(19) United States
(12) Patent Application Publication
(10) Pub. No.: US 2018/0057881 A1
(43) Pub. Date: Mar. 1, 2018

(54) METHODS OF DETECTING SNPS RELATED TO MRSA AND SSI

(71) Applicant: William Beaumont Hospital, Royal Oak, MI (US)

(72) Inventor: Matthew Sims, Troy, MI (US)

(21) Appl. No.: 15/685,449

(22) Filed: Aug. 24, 2017

Related U.S. Application Data
(60) Provisional application No. 62/378,851, filed on Aug. 24, 2016.

(51) Int. Cl. C12Q 1/68

(52) U.S. Cl. CPC C12Q 1/6883; C12Q 2600/118; C12Q 2600/156

(57) ABSTRACT

A method for identifying, diagnosing, and treating individuals who may be at risk developing or may have developed recurrent antibiotic resistant skin infections including MRSA and SSI. Also included are methods for detecting whether a nucleotide of one or more single nucleotide polymorphisms (SNP) is present at a SNP position, related probes.

### FIELD OF INVENTION

[0001] The present invention is in the field of biochemistry and medicine and relates to methods for detecting, diagnosing, and/or treating Antibiotic-Resistant Staphylococcus aureus (MRSA) and Surgical Site Infection (SSI).

### CROSS-REFERENCE TO RELATED APPLICATION

[0002] This U.S. patent application claims priority to U.S. Provisional Application 62/378,851 filed on Aug. 24, 2016, the disclosure of which is considered part of the disclosure of this application and is hereby incorporated by reference in its entirety.

### SEQUENCE LISTING

[0003] The Sequence Listing accompanying this application is contained within the computer readable file entitled “2016-06-14_5475-373745_SEQ_LIST_ST25.txt” submitted electronically and contemporaneously with the filing of this application through the USPTO EFS-Web. The file is 2.03 MB, was created on Jun. 14, 2016, and is incorporated herein by reference.

### BACKGROUND OF THE INVENTION

[0004] Staphylococcus aureus (Staph, S, or SA) bacteria are a common component of the skin surface and lining of the nasal passageways in humans and other animals. Staph aureus is usually spread by skin-to-skin or skin-to object-to skin contact. Studies show that about one in three people carry Staph in their nose according to the U.S. Centers for Disease Control (CDC). When limited to the skin surface and lining of the nasal passageways, S. aureus bacteria are normally harmless. However, S. aureus infections can occur in situations where the bacteria enter into the skin subsurface or body cavity, normally through wounds (including, e.g., surgical incisions) or other sites such as hair follicles. Methicillin-Resistant Staphylococcus aureus is known as, and is used here by the abbreviation “MRSA.” MRSA is a strain of Staph. aureus that has become resistant to methicillin and other related antibiotics, commonly used to treat ordinary S. aureus infections. Studies show that about 2 in 100 people carry MRSA, according to the CDC. MRSA infections are particularly hard to treat and a subset of the population we call “MRSA high risk” is at higher than normal risk of getting a MRSA infection following exposure to the MRSA bacteria.

[0005] SSI is another type of infection that is often caused by MRSA. SSI is an abbreviation for “Surgical Site Infection.” SSI can appear as an abscess or inflammation of the skin often associated with a wound, usually a surgical wound. An SSI is often the direct or indirect result of surgery and frequently but not always involves a MRSA infection.

[0006] MRSA infections and SSIs can start as swollen, painful red bumps that might resemble pimples or spider bites. They can appear as swollen and painful boil-like symptoms, and they are typically initially treated locally. The affected area can be warm to the touch, full of pus or other drainage and accompanied by a fever. The “red bumps” can quickly turn into deep, painful abscesses. Sometimes the bacteria remain confined to the skin. But they can also burrow deep into the body, causing life-threatening infections in bones, joints, surgical wounds, the bloodstream, heart valves and lungs. MRSA sometimes causes a person's death. The CDC tracks and reports MRSA infections and deaths on its website, look up MRSA Home. MRSA and SSI Staph infections may be systemic and should usually be treated with systemically administered antibiotics; many individuals need to be treated by what is often called “decolonization” following an infection.

[0007] Traditional risk assessment for MRSA includes various forms of MRSA including the forms known as “HA” or “HS” (Hospital Acquired or Healthcare Settings). MRSA infections often involve several factors. Whether or not hospitalization is involved is important but not the only factor to be considered. MRSA infections in people exposed to general group exposure such as contact sports may have what is termed “Community-Acquired” MRSA or “CA-MRSA.” The detailed teaching of this disclosure applies to all forms of MRSA.

[0008] MRSA is a big concern in hospitals where it can attack those most vulnerable who tend to be older adults and people with weakened immune systems. Another factor is whether or not an invasive medical device is involved with or without invasive surgery. MRSA is often acquired or develops in medical care facilities, such as hospitals. This type of MRSA is known as Health Care-Associated MRSA (HA-MRSA). Devices like medical tubing, such as intravenous lines or urinary catheters, can provide a pathway for MRSA to travel into a body. MRSA is prevalent in nursing homes and thus living in a long-term care facility can increase the risk of exposure and infection. MRSA infections often occur in patients having weakened immune systems who are exposed to the bacteria, such as patients in long term care, patients undergoing kidney dialysis, and patients recovering from recent surgery or medical treatments such as chemotherapy that weaken the immune system. MRSA can spread easily through cuts and abrasions and skin-to-skin contact, thus a risk factor for both HA-MRSA and CA-MRSA.

[0009] MRSA can also develop in otherwise healthy people not exposed to hospital situations. CA-MRSA is often acquired from participation in contact sports, sharing towels, washcloths, razors, uniforms or clothing or living in crowded or unsanitary conditions and being exposed to others wounds, bandages or coverings. Skin wounding events or other forms of interruption in skin integrity (e.g., intravenous drug use) are another major risk factor for MRSA infections. Sometimes compromised individuals who are frequently exposed to MRSA never acquire the infection. Some people who do become infected with MRSA never show symptoms, but these “carriers” of MRSA can spread it without being ill themselves. CA-MRSA has often been found to be acquired by athletes (who may share towels and razors), children in day care, members of the military and people obtaining tattoos, for example. Outbreaks of MRSA have occurred in military training camps, child care centers and jails.

[0010] Until recently, the risk of developing MRSA was predicted based on a person's behavior, history, living circumstance, lifestyle and potential exposure to the resistant bacteria. It has long been known that some individuals seem to be very susceptible to Staph infections and they develop recurrent MRSA skin infections, or SSI, even though they don't have many or even any of the known risk factors. Until now, there have been no known methods to identify such people. Such populations can have an elevated risk for developing MRSA if admitted to medical care facilities in spite of not having any known MRSA risk factors. Conversely many individuals with known MRSA risk factors never develop MRSA or SSI in spite of high exposure including many lengthy stays in hospitals with invasive surgery. In this document the teaching and claims applies to and can be used with and for diseases and individuals having, exposed to or susceptible to SSI, MRSA, CA-MRSA and HA-MRSA unless indicated otherwise.

[0011] Once identified as being at high risk or as having MRSA or SSI then the treatment for these individuals can involve attempts to decolonize the skin and nasal passages of the patient with topical antibiotics. This can be temporarily effective, especially when coupled with improved sanitation such as frequent hand washing and isolation from other patients, but often it fails.

[0012] Improved methods of recognizing and predicting who may be more susceptible than the average, or normal person, to recurrent MRSA, CA-MRSA, HA-MRSA and SSI are needed. We believe a person's risk of acquiring a MRSA infection can be better determined by including consideration of a person's genetic predisposition to the disease and creating a genetic and exposure based risk profile. Here we disclose new tools and new methods to make a MRSA risk analysis and MRSA treatments that are not simply based on general patterns of exposure to the disease. We provide a genetic tool based analysis with many heretofore unknown factors that we believe can both improve patient care for those susceptible to MRSA, identify those at risk of MRSA that do not have the typical risk factors, identify those NOT at risk of MRSA infections that DO have the typical risk factors. These measures can reduce the number of false positives, i.e., labeling people as being at high risk of acquiring a MRSA infection when in fact they are not at high risk. It is in no one's interest in using professional medical staff time and money to prevent a MRSA infection simply based on traditional factors, when in fact, a person is no more likely to be afflicted with a MRSA infection than the average person. We teach how to direct the efforts to prevent MRSA infections to where they need to be directed and used, on people who are truly at high risk of developing a MRSA infection.

### SUMMARY OF THE INVENTION

[0013] In one embodiment, the present invention is a method of detecting whether a nucleotide of one or more single nucleotide polymorphisms (SNP) is present at a SNP position, wherein the one or more SNPs is adenine or cytosine at a SNP position a1, cytosine or guanine at SNP position b2, guanine or thymine at SNP position c3, cytosine or thymine at SNP position d4, thymine or guanine at SNP position e5, guanine or adenine at SNP position f6, guanine or adenine at SNP position g7, thymine or cytosine at SNP position h8, adenine or guanine at SNP position i9, guanine or adenine at SNP position j10, adenine or guanine at SNP position k11, cytosine or thymine at SNP position l12, and guanine or adenine at SNP position m13, including: obtaining from a human subject a blood sample having or suspected of having the nucleotide at the SNP position; and detecting in the blood sample whether the nucleotide of the SNP is present at the SNP position, wherein the nucleotide is cytosine at SNP position b2, guanine at SNP position c3, cytosine at SNP position d4, thymine at SNP position e5, guanine at SNP position f6, guanine at SNP position g7, thymine at SNP position h8, adenine at SNP position i9, guanine at SNP position j10, adenine at SNP position k11, cytosine at SNP position l12, and/or guanine at SNP position m13. In another embodiment, the method may include detecting in the blood sample whether adenine is present at SNP position a1. And in another embodiment, the nucleotide may be detected in two or more SNPs.

[0014] In one example of the method, the subject potentially may have been exposed to or may be exposed to infection by antibiotic-resistant Staphylococcus aureus (MRSA) or a surgical site infection (SSI). In a further example: the subject may have had a surgical procedure or a procedure involving an invasive medical device, may have been living in unsanitary conditions, or may have been participating in sports activities with exposure to cuts or other injuries; or (b) may be in need of a surgery or a stay at a medical treatment or care facility.

[0015] An aspect of the invention is the method wherein the detecting step may include contacting the blood sample with an oligonucleotide probe that is hybridizable with the nucleotide located at the SNP position, and detecting the hybridization.

[0016] A further embodiment of the above-described methods also may include: administering to the subject an aggressive treatment for recurrent MRSA when the detected nucleotide of the SNP is present at the SNP position. And in an additional embodiment, the aggressive treatment may be include decolonization of MRSA from the skin or nasal passages of the subject, aggressive antibiotic therapy, administration of antibiotic-resistant drugs, isolation therapy, and/or recolonization therapy.

[0017] In another example, the present inventive method is detecting whether a nucleotide of one or more single nucleotide polymorphisms (SNP) is present at a SNP position, wherein the one or more SNPs are adenine or cytosine at a SNP position a1, cytosine or guanine at SNP position b2, guanine or thymine at SNP position c3, cytosine or thymine at SNP position d4, thymine or guanine at SNP position e5, guanine or adenine at SNP position f6, guanine or adenine at SNP position g7, thymine or cytosine at SNP position h8, adenine or guanine at SNP position i9, guanine or adenine at SNP position j10, adenine or guanine at SNP position k11, cytosine or thymine at SNP position l12, and guanine or adenine at SNP position m13, including: obtaining from a human patient a blood sample having or suspected of having the nucleotide at the SNP position; and detecting in the blood sample whether the nucleotide of the SNP is present at the SNP position, wherein the nucleotide is guanine at SNP position b2, thymine at SNP position c3, thymine at SNP position d4, guanine at SNP position e5, adenine at SNP position f6, adenine at SNP position g7, cytosine at SNP position h8, guanine at SNP position i9, adenine at SNP position j10, guanine at SNP position k11, thymine at SNP position l12, and/or adenine at SNP position m13. And in another embodiment, the method also may include detecting in the blood sample whether cytosine is present at SNP position a1. With this embodiment, the method also may include not administering to the subject an aggressive treatment for recurrent MRSA when the detected nucleotide of the SNP is present at the SNP position.

[0018] Also disclosed herein is a method of providing medical services to a human subject suspected of having or having recurrent antibiotic-resistant Staphylococcus aureus (MRSA) or a surgical site infection (SSI), including: obtaining a biological sample from the subject; requesting diagnostic information about the sample, wherein the diagnostic information is an identity of a nucleotide of one or more single nucleotide polymorphisms (SNP) at a SNP position, wherein the one or more SNPs is adenine or cytosine at a SNP position a1, cytosine or guanine at SNP position b2, guanine or thymine at SNP position c3, cytosine or thymine at SNP position d4, thymine or guanine at SNP position e5, guanine or adenine at SNP position f6, guanine or adenine at SNP position g7, thymine or cytosine at SNP position h8, adenine or guanine at SNP position i9, guanine or adenine at SNP position j10, adenine or guanine at SNP position k11, cytosine or thymine at SNP position l12, and/or guanine or adenine at SNP position m13; and administering a treatment for recurrent MRSA or SSI when the identity of the nucleotide of one or more SNPs is a high MRSA risk SNP.

[0019] In one embodiment, the method of providing medical services further may include requesting additional diagnostic information about the sample, wherein the additional diagnostic information is an identity of adenine or cytosine at a SNP position a1; and administering a treatment for recurrent MRSA or SSI when the identity of the nucleotide of one or more SNPs is a high MRSA risk SNP and adenine is identified at the SNP position a1. In a further embodiment, the identity of the nucleotide of one or more SNPs may be cytosine at SNP position b2, guanine at SNP position c3, cytosine at SNP position d4, thymine at SNP position e5, guanine at SNP position f6, guanine at SNP position g7, thymine at SNP position h8, adenine at SNP position i9, guanine at SNP position j10, adenine at SNP position k11, cytosine at SNP position l12, and/or guanine at SNP position m13; and the treatment for recurrent MRSA or SSI is administered. In another embodiment, the identity of the nucleotide at SNP position a1 may be adenine; and the treatment for recurrent MRSA or SSI is administered. In another aspect, the treatment may be decolonization of MRSA from the skin or nasal passages of the subject, aggressive antibiotic therapy, administration of antibiotic-resistant drugs, isolation therapy, and/or recolonization therapy.

[0020] In another example of the method of providing medical services, the identity of the nucleotide of one or more SNPs may be guanine at SNP position b2, thymine at SNP position c3, thymine at SNP position d4, guanine at SNP position e5, adenine at SNP position f6, adenine at SNP position g7, cytosine at SNP position h8, guanine at SNP position i9, adenine at SNP position j10, guanine at SNP position k11, thymine at SNP position l12, and/or adenine at SNP position m13; and the treatment for recurrent MRSA or SSI is not administered. Further, the identity of the nucleotide at SNP position a1 may be cytosine; and the treatment for recurrent MRSA or SSI is not administered.

[0021] Also described herein is an artificial probe including: one or more oligonucleotides from 5 to 1500 nucleotides in length, and conjugated to a label, marker or detectable moiety, wherein the one or more oligonucleotides is able to hybridize with from 5 to 1500 nucleotides adjacent to and including a single nucleotide located at a SNP position, and wherein the single nucleotide is cytosine or guanine at SNP position b2, guanine or thymine at SNP position c3, cytosine or thymine at SNP position d4, thymine or guanine at SNP position e5, guanine or adenine at SNP position f6, guanine or adenine at SNP position g7, thymine or cytosine at SNP position h8, adenine or guanine at SNP position i9, guanine or adenine at SNP position j10, adenine or guanine at SNP position k11, cytosine or thymine at SNP position l12, and guanine or adenine at SNP position m13. The probe also may include an oligonucleotide from 5 to 1500 nucleotides in length, and conjugated to a label, marker or detectable moiety, wherein this oligonucleotide is able to hybridize with from 5 to 1500 nucleotides adjacent to and including an adenine or cytosine located at a SNP position a1.

[0022] In another aspect of the inventive probe, the one or more oligonucleotides may be from 10 to 200 nucleotides. In another example, the single nucleotide located at the SNP position may be cytosine at SNP position b2, guanine at SNP position c3, cytosine at SNP position d4, thymine at SNP position e5, guanine at SNP position f6, guanine at SNP position g7, thymine at SNP position h8, adenine at SNP position i9, guanine at SNP position j10, adenine at SNP position k11, cytosine at SNP position l12, and/or guanine at SNP position m13. Further, the single nucleotide located at the SNP position may be guanine at SNP position b2, thymine at SNP position c3, thymine at SNP position d4, guanine at SNP position e5, adenine at SNP position f6, adenine at SNP position g7, cytosine at SNP position h8, guanine at SNP position i9, adenine at SNP position j10, guanine at SNP position k11, thymine at SNP position l12, and/or adenine at SNP position m13. As further described below, the one or more oligonucleotides may be conjugated to a detectable moiety and the detectable moiety may be a radioactive label, a P32 label; or a fluorescent label. In yet a further example of the inventive probe, the hybridization may occur under strict conditions.

[0023] In contrast to a normal or low risk individual, a “high risk” also called a “greater than normal risk” individual is someone who, once they are exposed to MRSA, will likely become infected with MRSA, or someone who has a MRSA infection, will, much more frequently than a normal person, will likely become reinfected with MRSA after standard treatment. It should be understood as we state in the background that a not insignificant portion of the population, about 1-3 in 100 individuals who, according to the CDC estimates are people who carry MRSA, often in their nostrils, but who show no symptoms and do not become infected, are so called MRSA “carriers.” In contract to those who carry MRSA but don't become infected or if infected are usually easily treated, are those more rare but not uncommon individuals, perhaps 1-3 percent of those who carry MRSA who we say are “high risk” individuals and they are either or both a) more likely to become infected in the first place from a MRSA exposure than would a normal or control person when they are simply exposed to the bacteria with typical skin contact, and b) those who once they become infected with MRSA are much more likely to become re-infected with a second or subsequent MRSA infection following a second exposure to the bacteria.

[0024] As noted above, the MRSA bacteria is not rare, and it can be found in many environments where a great many people frequent, but relatively few people (few compared to the general population) will consistently develop a MRSA infection within a month or two after being exposed to the MRSA bacteria, many of these people are also people who, once they develop a MRSA infection, are much more likely to develop a second, third or additional MRSA infection after their first infection. That is some people seem to have a much greater chance of developing repeated MRSA infections. In a relatively small group of people once they have a MRSA infection, they are likely to get another MRSA infection, often within a few months. These “high risk” or “greater than normal risk” individuals who get a MRSA infection will often go on to develop repeated MRSA infections at a much greater frequency than what is “normal” for most individuals. It is these people who are more likely to develop, or potentially may develop, initial and or repeated MRSA infections following exposure that we call “high risk” individuals.

[0025] For the first time we believe we can test, identify, predict and determine who is at high risk and treat those high risk people and we can even do it before they have had their first MRSA infection.

[0026] Furthermore some of the people who would be considered “high risk” based on traditional criteria are in fact not high risk, they do not need to endure the sometimes expensive and time consuming treatments that many high risk people are asked to accept, and we think we can identify those people as well.

[0027] Sometimes a person will have a nasty MRSA infection more than once, sometimes 3 or 4, even 8 or more times before either the person or the people treating the person will realize that the person is in fact at high risk of developing MRSA and he or she should be given extraordinary treatment. Often this extraordinary treatment will be some version of what is called “decolonization” which is a treatment with the goal of trying to eliminate any and all residual MRSA bacteria living on the person's skin. Knowing that a person is at high risk for MRSA early can save a person money, resources, time and in some cases the person's life.

[0028] We describe methods and tools that can be used to measure, predict or assess the level of risk, and even treat a subject who is developing, is likely to develop, or potentially may develop, a MRSA infection and/or an SSI infection. We describe a family of thirteen SNPs or genetic markers, we call their location in the gene the “critical SNP nucleotides” at “critical SNP positions” that, if present in an individual's genome, either individually or in combination, indicates a greater than normal risk or greater than normal chance that the individual with the high risk SNP or marker might develop MRSA or SSI if exposed to the bacteria that cause MRSA or SSI. Most of the SNPs we describe are within genes but one SNP is between two genes. The SNPs or markers we describe are in or near the following genes. FAM 129B (1 SNP); RBM6 (1 SNP); KANK 4 (1 SNP); Col 13A1—closest to gene (1 SNP); COL 19A1 (5 SNPs); IGSF8 (1 SNP); ADARB2 (1 SNP); DCT (1 SNP) and one critical SNP position is between genes LTF and CCRL-2 (1 SNP). (The number in parenthesis is the number of SNPs associated with or near the indicated gene.)

[0029] The SNPs in this document are given a unique alpha numeric number (e.g., 1a, 2b, 3c, etc.) and a unique “rs” number and those SNPs have both a “critical SNP position” and critical SNP nucleotides are in those positions. Here “critical SNP position” means the position of the nucleotide in the genome and the nucleotide at that position is then indicated herein as one of two types, it is either “normal” or “high” risk. The detection and characterization is important in determining whether or not the person being evaluated is a person who is “normal” or at “high risk” as we discuss herein and in the definitions. The critical SNP positions and nucleotides are given the following names and numbers herein and the genes, chromosomes and cytobands they are associated with. In 11 of the 13 SNPs the critical SNP position is within a gene, in 2 of the SNPs (d4 and m13) the critical SNP position is between 2 genes.

“a1)” and/or SNP/rs2249861 is a nucleotide location within the FAM 129B gene, chromosome 9, cytoband q34.11, SEQ ID NOs 1 and 2 have the full sequence of the FAM 129B gene;
“b2)” and/or SNP/rs2352969 is a nucleotide location within the RBM6 gene; chromosome 3, cytoband p21.31, SEQ ID NO 5 is the full sequence of the RBM6 gene;
“c3)” and/or SNP/rs12758910 is a nucleotide location within the KANK 4 gene; chromosome 1, cytoband p31.3, SEQ ID NO 8 is the full sequence of the KANK 4 gene;
“d4)” and/or SNP/rs2642572 is a nucleotide location between two genes, the uncharacterized protein C10orf35 isoform X1 gene and the Col 13A1 gene; chromosome 10, cytoband q22.1, SEQ ID NO 11 is the full sequence of the C10orf35 isoform X1 gene;
“e5)” and/or SNP/rs3793038 is a nucleotide location within the Col 19A1 gene; chromosome 6, cytoband q13, SEQ ID NO 14 is the full sequence of the Col19A1 gene;
“f6)” and/or SNP/rs3805987 is a nucleotide location within the Col 19A1 gene; chromosome 6, cytoband q13;
“g7)” and/or SNP/rs9454944 is a nucleotide location within the Col 19A1 gene; chromosome 6, cytoband q13;
“h8)” and/or SNP/rs978291 is a nucleotide location within the Col 19A1 gene; chromosome 6, cytoband q13;
“i9)” and/or SNP/rs978290 is a nucleotide location within the Col 19A1 gene; chromosome 6, cytoband q13;
“j10)” and/or SNP/rs1131891 is a nucleotide location within the IGSF8 gene; chromosome 1, cytoband p23.2, SEQ ID NO 25 is the full sequence of the IGSF8 gene;
“k11)” and/or SNP/rs127711411 is a nucleotide location within the ADARB2 gene; chromosome 10, cytoband p15.3, SEQ ID NO 28 is the full sequence of the ADARB2 gene;
“l12)” and/or SNP/rs4773794 is a nucleotide location within the DCT gene; chromosome 13, cytoband q32.1, SEQ ID NO 31 is the full sequence of the DCTgene; and
“m13)” and/or SNP/rs4619820 is a nucleotide location between two genes, CCR2 and LTF; chromosome 3, cytoband p21.31, SEQ ID NO 34 is the full sequence of the CCR2 gene.

[0030] Any one or a combination of two or more of the above SNPs, that is the nucleotides at the “critical SNP position” or the location in the genome of those critical SNP nucleotides, which we call the “critical SNP position,” or “critical SNP locus” are useful to indicate whether or not a person with the particular critical SNP nucleotide is likely to be at either a “normal” risk or at a “high” risk, i.e., “greater than normal” risk of developing MRSA when exposed to the MRSA bacteria.

[0031] When the critical SNP nucleotide is present in the “high risk” or “MRSA susceptible form,” that individual has a much greater likelihood of developing a MRSA infection if exposed to a MRSA bacteria or infectious agent. Here this is also referred to as having a “high risk” or a “greater than normal risk” of developing a MRSA infection after exposure to the MRSA bacteria. In contrast to the “high risk” critical SNP nucleotides there are also the “normal risk” critical SNP nucleotide that a “normal” or “control” person has. A “normal” or “control” person is a person who has the “normal” or “control” version of the critical SNP nucleotides at the critical SNP position. The normal or control person is not associated with a greater likelihood, or high risk of contracting a MRSA infection after exposure to MRSA bacteria or SSI exposure. Thus the critical SNP position is the position or locus in the genome that holds a critical SNP nucleotide that is an important factor in determining whether or not an individual will have a normal or greater than normal risk of developing a MRSA infection if that individual is exposed to a MRSA bacteria. The critical SNP nucleotide and the information it provides can be combined with traditional risk factors to create an “overall MRSA risk profile” for any given individual.

[0032] These genetic markers are used in various combinations and in various ways with different preventive or treatment plans that can be fashioned and used to make their use appropriate and important for the control and treatment of possibly lethal bacterial infections. Each single nucleotide polymorphism (SNP) or “marker” and its location, or critical SNP position is identified and described. Their use and how to find and measure them and then confirm whether or not a person has one or more of these critical SNPs, or indicator SNPs, and their critical SNP location, and their critical SNP nucleotides, are described. These markers provide a means to reveal hidden signals in people that can be used to identify and proactively treat and prevent infection in people who may be at a high risk of developing MRSA or SSI, even those who have few or none of the typical risk factors. These markers or critical SNP positions and critical SNP nucleotides can also provide a means to reveal hidden signals in people that can be used to identify those people who might otherwise be incorrectly identified as needing proactive prevention or even treatment but who in fact are not at greater risk than “controls” or normal people. Methods, procedures, artificial probes and methods and procedures to use those probes are disclosed.

### DETAILED DESCRIPTION OF THE INVENTION

[0033] It should be understood that the invention is not limited to the particular embodiments of the invention described below, as variations of the particular embodiments would be known to one skilled in the art after reading this description. It is also to be understood that the terminology employed is for the purpose of describing particular embodiments, and is not intended to be limiting.

[0034] Where a range of values is provided, it is understood that each intervening value, to the tenth of the unit of the lower limit unless the context clearly dictates otherwise, between the upper and lower limit of that range, and any other stated or intervening value in that stated range, is encompassed within the invention. The upper and lower limits of these smaller ranges may independently be included in the smaller ranges, and are also encompassed within the invention, subject to any specifically excluded limit in the stated range. Where the stated range includes one or both of the limits, ranges excluding either or both of those included limits are also included in the invention.

[0035] All references, patents, patent publications, articles, and databases, referred to in this application are incorporated herein by reference in their entirety, as if each were specifically and individually incorporated herein by reference. Such patents, patent publications, articles, and databases are incorporated for the purpose of describing and disclosing the subject components of the invention that are described in those patents, patent publications, articles, and databases, which components might be used in connection with the presently described invention. The information provided below is not admitted to be prior art to the present invention, but is provided solely to assist the understanding of the reader.

[0036] The details of one or more embodiments of the invention are set forth in the accompanying drawings and the description below. Other features, embodiments, and advantages of the invention will be apparent from the description and drawings, and from the claims. The preferred embodiments of the present invention may be understood more readily by reference to the following detailed description of the specific embodiments and the Examples included hereafter.

[0037] For clarity of disclosure, and not by way of limitation, the detailed description of the invention is divided into the subsections that follow.

### Definitions

[0038] Unless defined otherwise, all technical and scientific terms used herein have the meaning commonly understood by one of ordinary skill in the art to which this invention belongs. Generally, the nomenclature used herein and the laboratory procedures in cell culture, molecular genetics, organic chemistry and nucleic acid chemistry described below are those well-known and commonly employed in the art. Although any methods, devices and materials similar or equivalent to those described herein can be used in the practice or testing of the invention, the preferred methods, devices and materials are now described.

[0039] In this specification and the claims, the singular forms “a,” “an” and “the” include plural reference unless the context clearly dictates otherwise.

[0040] The practice of the present invention will employ, unless otherwise indicated, conventional techniques of molecular biology, microbiology, recombinant DNA technology, and immunology, which are within the skill of the art. Such techniques are explained fully in the literature. See, e.g., Sambrook et al. (2001) Molecular Cloning: A Laboratory Manual, 3rd ed., Cold Spring Harbor Press; DNA Cloning, Vols. I and II (D. N. Glover ed. 1985); Oligonucleotide Synthesis (M. J. Gait ed. 1984); Nucleic Acid Hybridization (B. D. Hames & S. J. Higgins eds. 1984); Animal Cell Culture (R. K. Freshney ed. 1986); Immobilized Cells and Enzymes (IRL press, 1986); Perbal, B., A Practical Guide to Molecular Cloning (1984); the series, Methods In Enzymology (S. Colowick and N. Kaplan eds., Academic Press, Inc.); and Handbook of Experimental Immunology, Vols. I-IV (D. M. Weir and C. C. Blackwell eds., 1986, Blackwell Scientific Publications).

[0041] When a nucleotide sequence or base is a critical, then a “critical SNP position” is provided and the nucleotide base in the critical SNP position or locus is considered to be a critical SNP nucleotide or critical SNP nucleotide polymorphism. The knowledge of the critical SNP position and its critical SNP nucleotide polymorphism is but one factor in indicating or predicting whether the person with that critical SNP nucleotide has either a “normal risk” or a “high risk” of becoming infected with MRSA, should the person be exposed to MRSA bacteria. In this document a person with a “normal risk” is the same as a “control” or “control risk” person. In this document a person with a “greater than normal risk” of developing MRSA, is the same as a person with a “high,” “high risk” or “higher than normal risk” of becoming infected with MRSA if that person is exposed to MRSA bacteria. The critical SNPs have either control or normal critical SNP nucleotides which indicate the individual with that particular SNP being identified is consider “normal risk” individual with a normal risk of becoming infected with an antibiotic resistant Skin Infections, such as an antibiotic resistant Staph Infection or a MRSA infection, or an SSI infection, which indicates that should a person be exposed to such an antibiotic resistant infective agent he or she is likely to become infected with that antibiotic resistant agent. In this document a person is either at a “normal”, “control”, or “average” risk or the person is at “high” risk, “great” risk, or “greater than normal” risk of becoming infected with that antibiotic resistant agent, such as antibiotic resistant Staph Infection, MRSA or SSI, following exposure to the antibiotic resistant agent. In the “high”, “great” or “greater than normal risk” group the person will have one, more than one, or sometimes all 13 high risk SNPs, that is a “high risk variant in the genetic location that we refer to as the critical SNP nucleotide, or high risk critical SNP nucleotide polymorphism which indicates the particular SNP being identified is associated with a person having a high or greater than normal risk of becoming infected with an antibiotic resistant agent that promotes skin disease, such as antibiotic resistant Staph, MRSA or SSI. “Greater than normal” risk” herein is the same as “high” risk and “greater” risk of getting an antibiotic resistant infection following exposure to an antibiotic resistant agent.

[0042] The SNPs, either normal or high risk, are identified both by their associated genes, as well as their position or locus either in or in a described position relative to a described gene or genes. In at least one example between two defined and known genes of the human genome.

[0043] We clearly identify and precisely describe the location in the genome where there are special SNPs, or critical SNP positions, and what that nucleotide is in a normal person or a high risk person and whether that person has a normal or high risk of getting an antibiotic resistant Skin Infection such as a MRSA infection after exposure to a MRSA bacteria, or a Staph or SSI infection. We can also identify the person with a “normal” risk of getting a an antibiotic resistant Skin Infection such as a MRSA infection after exposure to a MRSA bacteria, or a Staph or SSI infection, this type of person may also be referred to as a “control”, “average” or a normal individual with a normal or average risk of getting a MRSA infection after exposure to antibiotic resistant Skin Infection. Sometimes identifying the normal or low risk individual can be as or more important to the patient and the treating physician as identifying the high risk individual.

[0044] The importance of being able to identify and treat the high risk individual cannot be overstated. We estimate that roughly 50 of every 300 individuals who are considered MRSA carriers who have had one or more MRSA infection may be considered as “high risk” individuals who are found to routinely carry the MRSA bacteria, and of those 50 we estimate that about 5 or 10 percent of those high risk individuals who carry the MRSA bacteria have a very high chance of dying from a MRSA infection within 2 years of their last infection, if they are not under a careful health watch.

[0045] In these descriptions and examples a single nucleotide base is critical to the identification and prediction of MRSA susceptibility and whether or not an individual patient has a high risk or a normal risk for developing a MRSA, HA-MRSA or CA-MRSA infection. In some situations, like that just described, the terminology used here is precise and descriptions are given for unique and critical SNP nucleotides for the purpose of describing particular embodiments of the invention.

[0046] Conversely, in other descriptions, such as with whole and partial genes, gene sequences, general oligonucleotide descriptions, artificial segments and such, it should be understood that this invention is not limited to specific individual or particular nucleotides, polymorphisms or oligonucleotide sequences, or polypeptide sequences. Sometimes such sequences can vary and such variations would be expected and understood by one of ordinary skill in the art. As we discuss herein, a typical gene has thousands of SNPs most of which have little to no known effects on the person with those SNPs, and we are not teaching or even suggesting that every nucleotide position is critical. For example the SEQ ID NOs provided in the specification and in the sequence listing that describe most of the gene sequences and that are not specifically said to be in a critical SNP positions, can, for the most part, have variations. It is only those SNPs in a critical SNP position, with a critical SNP nucleotide, or polymorphism associated with the described specific alpha numeric number (e.g., 1a, 2b, 3c, etc.), and in most cases have an “rs” number, that indicates the described nucleotides are limited to the precise DNA nucleotide described.

[0047] For example, nucleotides used in probes that are taught by these procedures and other procedures commonly known to one skilled in the art, may have numerous differences from the sequences we provide, both as to the full length gene and to partial gene sequences. A probe that is modified and used to detect the critical SNPs positions and their nucleotides may have some variation is its gene sequence from the sequences provided here and in the sequence listing.

[0048] Generally the longer the nucleotide sequence of the probe, the more variability is allowed for nucleotide substitutions that can still give the probe highly stringent hybridization but have little or minimum effect on the effectiveness of the probe.

[0049] In describing the present invention, the following terms will be employed and are intended to be defined as indicated below.

[0050] The expression “aggressive treatment” or “aggressive antibiotic resistant treatment” of these infections as well as methods of reducing or preventing recurrence, or prophylactic treatment of antibiotic resistant infection may include the following:

[0051] Decolonization, which tries to eliminate or at least reduce the bacteria from the skin and nasal passages by use of a variety of agents which can include: intranasal mupirocin, intranasal provodone iodine, intranasal alcohol and/or topical preparations for the skin including chlorhexidine or provodone iodine delivered via methods which include bath or impregnated cloths, or dilute bleach treatment via bath or impregnated cloths. In one embodiment, a dermal peel is used as an aggressive treatment.

[0052] Aggressive antibiotic therapy which raises the level of antibiotics used to more active antibiotics than normally used first-line which may include daptomycin, linezolid, tedezolid, or ceftaroline as well as combinations of antibiotics which could include the antibiotic rifampin which is synergistic with many other antibiotics.

[0053] Recolonization therapy can be used following decolonization which is an attempt to replace the “bad” Staph aureus bacteria with other bacteria considered non-pathogenic or “harmless” such as Staph epidermidis a typical normal bacteria found on the skin. This would be via lotions or other carriers containing live cultures of the bacteria.

[0054] In addition in cases where the patients are found to continue to recur, decolonization of family members, close contacts, or pets may be attempted as well as extensive environmental cleaning to remove reservoirs of Staph aureus in the local environment of the patient.

[0055] The expression “anti-MRSA antibiotics” refers to antibiotics that one ordinarily skilled in the art would understand to be antibiotics usually used to treat antibiotic resistant infections like MRSA. Examples of such drugs include Vancomycin, Daptomycin, Linezolid, Ceftaroline, and Telavancin, among other antibiotics.

[0056] The term, “biological sample” means any material or fluid (blood, lymph, etc.) derived from the body of a subject, that contains or may contain genomic DNA (chromosomal and mitochondrial DNA) or other oligonucleotides such as, for example, mRNA that derive from genomic DNA. Also included within the meaning of the term “biological sample” is an organ or tissue extract and culture fluid in which any cells or tissue preparation from a subject has been incubated. Methods of obtaining biological samples and methods of obtaining oligonucleotide molecules such as DNA and RNA from a biological sample are well known in the art.

[0057] The terms “complementary” or “complementarity” are used in reference to oligonucleotides related by the base-pairing rules for DNA-DNA, RNA-DNA and RNA-RNA pairing. For example, for the sequence “A-G-T,” is complementary to the sequence “T-C-A.” Complementarity may be “partial,” in which only some of the nucleic acid base pairs are matched according to the base pairing rules. Or, there may be “complete” or “total” complementarity between the nucleic acids. The degree of complementarity between nucleic acid strands has significant effects on the efficiency and strength of hybridization between nucleic acid strands. This is of particular importance in amplification reactions, as well as detection methods that depend upon binding between nucleic acids. Under “low stringency” conditions, strands with a lower degree of complementarity will hybridize with each other. Under “high stringency conditions,” only strands with a higher degree of complementarity will remain hybridized with each other.

[0058] “Complementary” may be modified, as in the term “completely complementary,” refers to an oligonucleotide where all of the nucleotides are complementary to a target sequence (e.g., a miRNA). A completely complementary oligonucleotide may be shorter than the target sequence, thus, only hybridizing to a portion of the target.

[0059] “Complementary” may be modified, as in the term “partially complementary” refers to an oligonucleotide where at least one nucleotide is not complementary to (i.e., one or more “mismatches” with) the target sequence. Preferred partially complementary oligonucleotides are those that can still hybridize to a target sequence under physiological conditions. A particular partially complementary oligonucleotide may have a ‘random’ pattern of one or more mismatches with the target sequence throughout the oligonucleotide (although the pattern of mismatches is preferentially constrained by retention of the ability to still hybridize to the target sequence under physiological conditions). A particular partially complementary oligonucleotide may have regions where the oligonucleotide sequence is highly, or even completely complementary to a target sequence, and regions where the oligonucleotide is not complementary, or is less complementary to the target sequence.

[0060] “Complementary” is illustrated, for example, partially complimentary oligonucleotides may have one or more regions that hybridize to a target sequence, and one or more regions that do not hybridize to the target sequence. Thus, a partially complementary sequence (such as a PCR or reverse transcriptase (RT) primer) may hybridize to a portion (i.e., the middle, the 5′, or 3′ end) of a particular target sequence, and not hybridize with the rest of the target sequence. Oligonucleotides with mismatches at the ends may still hybridize to the target sequence. Partially complementary sequences may be capable of binding to a sequence having less than 60%, 70%, 80%, 90%, 95%, to less than 100% identity to the target sequence. For purposes of defining or categorizing partially complementary sequences, a partially complementary sequence or region of a sequence becomes more complementary or becomes “highly complementary” as it approaches 100% complementarity to a target sequence. Thus, a highly complementary sequence may have 60%, 70%, 80%, 90%, 95%, to 99% identity to all or a portion of a target sequence. The exact percentage identity of the highly complementary sequence may depend on the length of the highly complementary sequence and the desired stringency and specificity of hybridization. Partially complementary sequences may hybridize to one or more target sequences. As we note, partially complementary sequences may be completely complementary or highly complementary to a portion of the target sequence, such that they are completely or highly complementary to, e.g., 5%, 10%, 20%, 30%, 40%, 50% 60%, 70%, 80%, 90%, 95%, 99% of the target sequence. Similarly, 5%, 10%, 20%, 30%, 40%, 50% 60%, 70%, 80%, 90%, 95%, 99% of the partially complementary sequence may be completely complementary or highly complementary to all or a portion of the target sequence.

[0061] By the term “control” or “normal” we mean a person who is of typical or average susceptibility to a MRSA infection after suffering from a MRSA exposure. A person or nucleotide that is considered a “normal” or a “control” in this description, is one with an average risk of developing a MRSA infection after exposure to MRSA. This normal or control person or nucleotide is to be contrasted with a “MRSA high risk” person who has a greater than normal risk of developing a MRSA infection after exposure to MRSA than would a normal or control person. The risk the MRSA high risk person faces is least twice as likely, (2×), to develop a MRSA infection following exposure to MRSA than the risk a normal or control person would have to develop a MRSA infection after they are exposed to MRSA. The control person has at least half or less chance of developing a MRSA infection after they are exposed to MRSA than a high risk person would have, and often a much higher chance of getting a MRSA infection.

[0062] The expression “critical SNP position” indicates the location or position, in or between the indicated gene or genes where the indicated SNP has the critical nucleotide that is an indicator of whether the person, patient or subject has a normal or higher than normal risk of developing a MRSA or SSI infection following exposure to the bacteria. The critical SNP nucleotide is indicative of a person being either “normal/control” or indicative of a person who has “greater than normal/high” risk of MRSA or SSI infection following exposure to MRSA.

[0063] A “cyclic polymerase-mediated reaction” refers to a biochemical reaction in which a template molecule or a population of template molecules is periodically and repeatedly copied to create a complementary template molecule or complementary template molecules, thereby increasing the number of the template molecules over time.

[0064] “Decolonization” is usually in reference to decolonization of Staph aureus and usually tries to eliminate or at least reduce the bacteria from the skin and nasal passages as well as the throat perineum and rectum. A variety of agents, both topical and systemic, have been used to decolonize S. aureus. Mupirocin (Bactroban Nasal made by GlaxoSmith Kline or Mupirocin nasal ointment is commonly used. Rifampin and doxycycline are sometimes used. Other treatments involve body washing with chlorhexidine. Sometimes body washing is applied with antibiotic treatments. Sometimes attempts to decolonize an individual have poor success rates when follow up cultures are taken of nasal flares, perineum, skin, and medical device exit sites.

[0065] By the term “detectable moiety” is meant, for the purposes of the specification or claims, a label molecule (isotopic or non-isotopic) which is incorporated indirectly or directly into an oligonucleotide, wherein the label molecule facilitates the detection of the oligonucleotide in which it is incorporated, for example when the oligonucleotide is hybridized to amplified gene polymorphic sequences. Thus, “detectable moiety” is used synonymously with “label molecule.” Synthesis of oligonucleotides will include the critical SNP at the critical SNP position can be accomplished by any one of several methods known to those skilled in the art. Label moieties or molecules are known to those skilled in the art as being useful for detection of the target and they include: radioactive, chemiluminescent, fluorescent and luminescent molecules. Various fluorescent molecules are known in the art which are suitable for use to label a nucleic acid for the method of the present invention. The protocol for such incorporation may vary depending upon the fluorescent molecule used. Such protocols are known in the art for the respective fluorescent molecule.

[0066] A “diagnosis” of MRSA, HA or CA-MRSA (here usually just MRSA) may include the early detection of the disease or a confirmation of a diagnosis of the disease that has been made from other signs and/or symptoms. A “diagnosis” can include a diagnosis of increased risk or high risk of development or recurrence of MRSA. A diagnosis may include a “prognosis,” that is, a future prediction of the progression of MRSA based on the presence or absence of one or more SNPs associated with MRSA or MRSA. A diagnosis or prognosis may be based on one or more samplings of DNA or RNA from a biological sample obtained from a subject. An “increased risk” of developing MRSA or MRSA may be diagnosed by the presence of one or more SNPs characteristic of a phenotype of susceptibility to recurrent MRSA in otherwise asymptomatic or undiagnosed subjects.

[0067] “DNA amplification” as used herein refers to any process that increases the number of copies of a specific DNA sequence by enzymatically amplifying the nucleic acid sequence. A variety of processes are known. One of the most commonly used is polymerase chain reaction (PCR). PCR involves the use of a thermostable DNA polymerase, known sequences as primers, and heating cycles, which separate the replicating deoxyribonucleic acid (DNA), strands and exponentially amplify a gene of interest. Any type of PCR, such as quantitative PCR, RT-PCR, hot start PCR, LAPCR, multiplex PCR, touchdown PCR, real-time PCR, etc., may be used. In general, the PCR amplification process involves a cyclic enzymatic chain reaction for preparing exponential quantities of a specific nucleic acid sequence. It requires a small amount of a sequence to initiate the chain reaction and oligonucleotide primers that will hybridize to the sequence. In PCR, the primers are annealed to denatured nucleic acid followed by extension with an inducing agent (enzyme) and nucleotides. This results in newly synthesized extension products. Since these newly synthesized sequences become templates for the primers, repeated cycles of denaturing, primer annealing, and extension results in exponential accumulation of the specific sequence being amplified. The extension product of the chain reaction will be a discrete nucleic acid duplex with a termini corresponding to the ends of the specific primers employed.

[0068] A DNA “coding sequence” or a “nucleotide sequence encoding” a particular protein is a DNA sequence that is transcribed and translated into a polypeptide in vitro or in vivo when placed under the control of appropriate regulatory elements. The boundaries of the coding sequence are determined by a start codon at the 5′ (amino) terminus and a translation stop codon at the 3′ (carboxy) terminus. A coding sequence can include, but is not limited to, prokaryotic sequences, cDNA from eukaryotic mRNA, genomic DNA sequences from eukaryotic (e.g., mammalian) DNA, and even synthetic DNA sequences. A transcription termination sequence will usually be located 3′ to the coding sequence. “Non-coding” genomic sequences may include regulatory, RNA transcription sequences (rRNA, tRNA, miRNA, etc.), introns and other non-gene sequences, such as structural sequences, putatively non-functional sequences (“junk DNA”) and the like.

[0069] The terms “enzymatically amplify”, “enzymatically amplifying”, “amplify” and “amplifying” is meant, for the purposes of the specification or claims, DNA amplification, i.e., a process by which nucleic acid sequences are amplified in number. There are several means for enzymatically amplifying nucleic acid sequences. Currently the most commonly used method is the polymerase chain reaction (PCR). Other amplification methods include LCR (ligase chain reaction) which utilizes DNA ligase, and a probe consisting of two halves of a DNA segment that is complementary to the sequence of the DNA to be amplified, enzyme QB replicase and a ribonucleic acid (RNA) sequence template attached to a probe complementary to the DNA to be copied which is used to make a DNA template for exponential production of complementary RNA; strand displacement amplification (SDA); Qβ-replicase amplification (QβRA); self-sustained replication (3 SR); and NASBA (nucleic acid sequence-based amplification), which can be performed on RNA or DNA as the nucleic acid sequence to be amplified.

[0070] A “fragment” of a molecule such as a protein or nucleic acid is meant to refer to a portion of a longer or larger amino acid or nucleotide genetic sequence.

[0071] The term “genome” refers to all the genetic material in the chromosomes of a particular organism. Its size is generally given as its total number of base pairs. Within the genome, the term “gene” refers to a locatable region of genomic sequence, corresponding to a unit of inheritance, which is associated with regulatory regions, transcribed regions and/or other functional sequence regions. “Non-gene regions” of the genome have or appear to have no functional role, but may have a structural (e.g., regions near the centromere) or unknown regulatory function. The physical development and phenotype of organisms can be thought of as a product of genes interacting with each other and with the environment. A concise definition of “gene” taking into account complex patterns of regulation and transcription, sequence conservation and non-coding RNA genes has been proposed by Gerstein et al. (Genome Research 17 (6), 669-681, 2007) “A gene is a union of genomic sequences encoding a coherent set of potentially overlapping functional products.” Id. In general, an individual's genetic characteristics, as defined by the nucleotide sequence of its genome, are known as its “genotype,” while an individual's physical traits are described as its “phenotype.”

[0072] By “heterozygous” or “heterozygous polymorphism” is meant that the two alleles of a diploid cell or organism at a given locus are different, that is, that they have a different nucleotide exchanged for the same nucleotide at the same place in their sequences.

[0073] By “homozygous” or “homozygous polymorphism” is meant that the two alleles of a diploid cell or organism at a given locus are identical, that is, that they have the same nucleotide for nucleotide exchange at the same place in their sequences.

[0074] By “hybridization” or “hybridizing,” as used herein, is meant the formation of A-T and C-G base pairs between the nucleotide sequence of a fragment of a segment of a oligonucleotide and a complementary nucleotide sequence of an oligonucleotide. By complementary is meant that at the locus of each A, C, G or T (or U in a ribonucleotide) in the fragment sequence, the oligonucleotide sequenced has a T, G, C or A, respectively. The hybridized fragment/oligonucleotide is called a “duplex.”

[0075] A “hybridization complex”, such as in a sandwich assay, means a complex of nucleic acid molecules including at least the target nucleic acid and a sensor probe. It may also include an anchor probe.

[0076] In a hybridization complex, two nucleic acid fragments are considered to be “selectively hybridizable” to a oligonucleotide if they are capable of specifically hybridizing to a nucleic acid or a variant thereof or specifically priming a polymerase chain reaction: (i) under typical hybridization and wash conditions, as described, for example, in Sambrook et al. supra and Nucleic Acid Hybridization, supra, (ii) using reduced stringency wash conditions that allow at most about 25-30% base pair mismatches, for example: 2×SSC, 0.1% SDS, room temperature twice, 30 minutes each; then 2×SSC, 0.1% SDS, 37° C. once, 30 minutes; then 2×SSC room temperature twice, 10 minutes each, or (iii) selecting primers for use in typical polymerase chain reactions (PCR) under standard conditions (described for example, in Saiki, et al. (1988) Science 239:487-491).

[0077] In a hybridization complex, the term “capable of hybridizing under stringent conditions” refers to annealing a first nucleic acid to a second nucleic acid under stringent conditions as defined below. Stringent hybridization conditions typically permit the hybridization of nucleic acid molecules having at least 70% nucleic acid sequence identity with the nucleic acid molecule being used as a probe in the hybridization reaction. For example, the first nucleic acid may be a test sample or probe, and the second nucleic acid may be the sense or antisense strand of a nucleic acid or a fragment thereof. Hybridization of the first and second nucleic acids may be conducted under stringent conditions, e.g., high temperature and/or low salt content that tend to disfavor hybridization of dissimilar nucleotide sequences. Alternatively, hybridization of the first and second nucleic acid may be conducted under reduced stringency conditions, e.g., low temperature and/or high salt content that tend to favor hybridization of dissimilar nucleotide sequences. Low stringency hybridization conditions may be followed by high stringency conditions or intermediate medium stringency conditions to increase the selectivity of the binding of the first and second nucleic acids. The hybridization conditions may further include reagents such as, but not limited to, dimethyl sulfoxide (DMSO) or formamide to disfavor still further the hybridization of dissimilar nucleotide sequences. A suitable hybridization protocol may, for example, involve hybridization in 6×SSC (wherein 1×SSC comprises 0.015 M sodium citrate and 0.15 M sodium chloride), at 65° Celsius in an aqueous solution, followed by washing with 1×SSC at 65° C. Formulae to calculate appropriate hybridization and wash conditions to achieve hybridization permitting 30% or less mismatch between two nucleic acid molecules are disclosed, for example, in Meinkoth et al. (1984) Anal. Biochem. 138: 267-284; the content of which is herein incorporated by reference in its entirety. Protocols for hybridization techniques are well known to those of skill in the art and standard molecular biology manuals may be consulted to select a suitable hybridization protocol without undue experimentation. See, for example, Sambrook et al. (2001) Molecular Cloning: A Laboratory Manual, 3rd ed., Cold Spring Harbor Press, the contents of which are herein incorporated by reference in their entirety.

[0078] A hybridization complex may refer to “stringent conditions” which typically will be those in which the salt concentration is less than about 1.5 M sodium ion, typically about 0.01 to 1.0 M Na ion concentration (or other salts) from about pH 7.0 to about pH 8.3 and the temperature is at least about 30° Celsius for short probes (e.g., 10 to 50 nucleotides) and at least about 60° C. for long probes (e.g., greater than 50 nucleotides). Stringent conditions may also be achieved with the addition of destabilizing agents such as formamide. Exemplary low stringency conditions include hybridization with a buffer solution of 30 to 35% formamide, 1 M NaCl, 1% SDS (sodium dodecyl sulfate) at 37° C., and a wash in 1-2×SSC at 50 to 55° C. Exemplary moderate stringency conditions include hybridization in 40 to 45% formamide, 1 M NaCl, 1% SDS at 37° C., and a wash in 0.5-1×SSC at 55 to 60° C. Exemplary high stringency conditions include hybridization in 50% formamide, 1 M NaCl, 1% SDS at 37° C., and a wash in 0.1×SSC at 60 to 65° C.

[0079] An “isolated” oligonucleotide or polypeptide is one that is substantially pure of the materials with which it is associated in its native environment. By substantially free, is meant at least 50%, at least 55%, at least 60%, at least 65%, at advantageously at least 70%, at least 75%, more advantageously at least 80%, at least 85%, even more advantageously at least 90%, at least 91%, at least 92%, at least 93%, at least 94%, at least 95%, at least 96%, at least 97%, most advantageously at least 98%, at least 99%, at least 99.5%, at least 99.9% free of these materials.

[0080] An “isolated” nucleic acid molecule is a nucleic acid molecule separate and discrete from the whole organism with which the molecule is found in nature; or a nucleic acid molecule devoid, in whole or part, of sequences normally associated with it in nature; or a sequence, as it exists in nature, but having heterologous sequences (as defined below) in association therewith.

[0081] As used herein, the term “locus” or “loci” refers to the location of a coding, regulatory or non-coding region on a chromosome. Absolute location of a region may be known to more or less precision (i.e., a locus is known to be located within a chromosome, chromosome arm, chromosome band, or to the nearest kilobase or base pair of a chromosome) due to the fact that genome length may differ slightly between individuals or the precise location of a locus is not known. A relative location may also be specified where a locus is located within a sequenced fragment of a chromosome. Pairs of genes, known as “alleles” may be present for a particular locus in organisms, such as humans, that are diploid (usually contain two copies of most chromosomes) in most cells and tissues. An individual's particular combination of alleles is referred to as its “genotype”. Where both alleles are identical the individual is said to be homozygous for the trait controlled by that gene pair; where the alleles are different, the individual is said to be heterozygous for the trait. While inclusive of loci within coding regions, an “allele” may also be present at locations in non-coding regions. Certain organisms, cells or tissues may be haploid or polyploid (triploid, etc.) and have more or less than two alleles at a particular locus.

[0082] A “melting temperature” is meant the temperature at which hybridized oligonucleotide duplexes dehybridize and return to their single-stranded state. Likewise, hybridization will not occur in the first place between two oligonucleotides, or, herein, an oligonucleotide and a fragment, at temperatures above the melting temperature of the resulting duplex. It is presently advantageous that the difference in melting point temperatures of oligonucleotide-fragment duplexes of this invention be from about 1° C. to about 10° C. so as to be readily detectable.

[0083] MRSA is a strain of S. aureus that has become resistant to methicillin, penicillin, amoxicillin and oxacillin among other antibiotics that are commonly used to treat ordinary S. aureus infections. When MRSA is acquired or develops in health care or medical care facilities, such as hospitals, it is known as hospital acquired or health care-associated MRSA. When MRSA develops in otherwise healthy people not exposed to hospital situations it is termed community-acquired MRSA. Here it should be understood that MRSA includes both HA-MRSA and CA-MRSA types of MRSA. Some people and animals are carriers of MRSA, including dogs and cats, and while they may carry MRSA, some carriers never develop MRSA infections, some do, and some people who are exposed to MRSA are at much greater risk than others of developing a MRSA infection. Sometimes a veterinary office will become a location where MRSA is easily spread. Sometimes an NFL locker room will become a location where MRSA is easily spread.

[0084] The term “normal” or “control” person means a person who has a typical or average susceptibility to getting a MRSA infection after being exposed to MRSA bacteria. A normal or control person typically has at least half the chance or risk of developing a MRSA infection as a person of increased or high risk of MRSA infection. Sometimes the high risk person will have as much as 10 times or even greater risk of having a MRSA infection than a normal person has of getting a MRSA infection even when the “normal” person and the “high risk” person have the same exposure to the MRSA bacteria.

[0085] As used herein, the term “nucleic acid molecule” is intended to include DNA molecules (e.g., cDNA or genomic DNA), RNA molecules (e.g., mRNA), analogs of the DNA or RNA generated using nucleotide analogs, and derivatives, fragments and homologs thereof. The nucleic acid molecule can be single-stranded or double-stranded, but advantageously is double-stranded DNA. “DNA” refers to the polymeric form of deoxyribonucleotides (adenine, guanine, thymine, or cytosine) in its either single stranded form, or a double-stranded helix. This term refers only to the primary and secondary structure of the molecule, and does not limit it to any particular tertiary forms. Thus, this term includes double-stranded DNA found, inter alia, in linear DNA molecules (e.g., restriction fragments), viruses, plasmids, and chromosomes. In discussing the structure of particular double-stranded DNA molecules, sequences may be described herein according to the normal convention of giving only the sequence in the 5′ to 3′ direction along the nontranscribed strand of DNA (i.e., the strand having a sequence homologous to the mRNA). An “isolated” nucleic acid molecule is one that is separated from other nucleic acid molecules that are present in the natural source of the nucleic acid.

[0086] A “nucleoside” refers to a base linked to a sugar. The base may be adenine (A), guanine (G) (or its substitute, inosine (I)), cytosine (C), or thymine (T) (or its substitute, uracil (U)). The sugar may be ribose (the sugar of a natural nucleotide in RNA) or 2-deoxyribose (the sugar of a natural nucleotide in DNA). A “nucleotide” refers to a nucleoside linked to a single phosphate group.

[0087] The term “oligonucleotide” refers to a series of linked nucleotide residues. The series of nucleotide residues are connected by a phosphodiester linkage between the 3′-hydroxyl group of one nucleoside and the 5′-hydroxyl group of a second nucleoside which in turn is linked through its 3′-hydroxyl group to the 5′-hydroxyl group of a third nucleoside and so on to form a polymer comprised of nucleosides linked by a phosphodiester backbone. Oligonucleotides may be used, for example, as primers in a PCR reaction, or as probes to detect the presence of a certain sequence in or within a nucleic acid molecule. A short oligonucleotide sequence may be based on, or designed from, a genomic or cDNA sequence and is used to amplify, confirm, or reveal the presence of an identical, similar or complementary DNA or RNA in a particular cell or tissue. Oligonucleotides may be chemically synthesized and may be used as primers or probes. A “modified oligonucleotide” refers to an oligonucleotide in which one or more natural nucleotides have been partially, substantially, or completely replaced with modified nucleotides.

[0088] The term “oligonucleotide encoding a peptide or protein” as used herein refers to a DNA fragment or isolated DNA molecule encoding a protein, or the complementary strand thereto; but, RNA is not excluded, as it is understood in the art that thymidine (T) in a DNA sequence is considered equal to uracil (U) in an RNA sequence. Thus, RNA sequences for use in the invention, e.g., for use in RNA vectors, can be derived from DNA sequences, by thymidine (T) in the DNA sequence being considered equal to uracil (U) in RNA sequences.

[0089] The following are non-limiting examples of oligonucleotides: a gene or gene fragment, exons, introns, mRNA, tRNA, rRNA, ribozymes, cDNA, recombinant oligonucleotides, branched oligonucleotides, plasmids, vectors, isolated DNA of any sequence, isolated RNA of any sequence, nucleic acid probes and primers. An oligonucleotide may comprise modified nucleotides, such as methylated nucleotides and nucleotide analogs, uracil, other sugars and linking groups such as fluororibose and thiolate, and nucleotide branches. The sequence of nucleotides may be further modified after polymerization, such as by conjugation, with a labeling component. Other types of modifications included in this definition are caps, substitution of one or more of the naturally occurring nucleotides with an analog, and introduction of means for attaching the oligonucleotide to proteins, metal ions, labeling components, other oligonucleotides or solid support.

[0090] The expression “overall MRSA risk profile” includes many factors or elements including but not only whether or not a person has a “critical SNP nucleotide” that indicates high MRSA risk factor but also includes various other factors such as whether or not the person has traditional MRSA risk factors, examples are living in crowded unsanitary conditions, participating in sports or other activities involving numerous and repeated cuts and injuries and other known general MRSA risk factors.

[0091] “Percent identity” can be determined by hybridization of oligonucleotides under conditions that form stable duplexes between similar regions, followed by digestion with single-stranded-specific nuclease(s), and size determination of the digested fragments. DNA sequences that are homologous can be identified in a Southern hybridization experiment under, for example, stringent conditions, as defined for that particular system. Defining appropriate hybridization conditions is within the skill of the art. See, e.g., Sambrook et al. supra; DNA Cloning, supra; Nucleic Acid Hybridization, supra.

[0092] PDT is Persistent and Difficult to Treat. An SSI may be one that is a PDT SSI.

[0093] A “polymerase” is an enzyme that catalyzes the sequential addition of monomeric units to a polymeric chain, or links two or more monomeric units to initiate a polymeric chain. The “polymerase” will work by adding monomeric units whose identity is determined by and which is complementary to a template molecule of a specific sequence. For example, DNA polymerases such as DNA pol 1 and Taq polymerase add deoxyribonucleotides to the 3′ end of an oligonucleotide chain in a template-dependent manner, thereby synthesizing a nucleic acid that is complementary to the template molecule. Polymerases may be used either to extend a primer once or repetitively or to amplify an oligonucleotide by repetitive priming of two complementary strands using two primers. A “thermostable polymerase” refers to a DNA or RNA polymerase enzyme that can withstand extremely high temperatures, such as those approaching 100° C. Often, thermostable polymerases are derived from organisms that live in extreme temperatures, such as Thermus aquaticus. Examples of thermostable polymerases include Taq, Tth, Pfu, Vent, deep vent, UlTma, and variations and derivatives thereof.

[0094] A “primer” is an oligonucleotide, the sequence of at least of portion of which is complementary to a segment of a template DNA which is to be amplified or replicated. Typically primers are used in performing the polymerase chain reaction (PCR). A primer hybridizes with (or “anneals” to) the template DNA and is used by the polymerase enzyme as the starting point for the replication/amplification process. The primers herein are selected to be “substantially” complementary to different strands of a particular target DNA sequence. This means that the primers must be sufficiently complementary to hybridize with their respective strands. Therefore, the primer sequence need not reflect the exact sequence of the template. For example, a non-complementary nucleotide fragment may be attached to the 5′ end of the primer, with the remainder of the primer sequence being complementary to the strand. Alternatively, non-complementary bases or longer sequences can be interspersed into the primer, provided that the primer sequence has sufficient complementarity with the sequence of the strand to hybridize therewith and thereby form the template for the synthesis of the extension product.

[0095] “Probes” refer to oligonucleotides nucleic acid sequences of variable length, used in the detection of identical, similar, or complementary nucleic acid sequences by hybridization. An oligonucleotide sequence used as a detection probe may be labeled with a detectable moiety. The probes may vary in length from about, any of the following and any range of numbers that includes any and all of the following numbers: 5, 10, 20, 30, 40, an 50, sequences in length for the typical relatively short probes to and to 60, 70, 80, 90 or 100 sequences in length for longer probes, in rare situations probes of up to medium length probes to 200, 300, 400, 500, 600, 700, 800, 900, and 1000, bases in length could be used for very long probes.

[0096] A “resistant skin infection” is a skin infection that does not respond to nor becomes eliminated after routine treatment with antibiotics including methicillin, penicillin, amoxicillin, oxacillin and other antibiotics used to treat common skin infections. A “resistant skin infection” can also mean an infection that at first appears to be successfully treated with commonly used antibiotics but then reappears, usually with within 1 to 3 months, and without any apparent reinfection from an infectious agent. Resistant skin infections may be caused by the properties of the infectious agents, being highly resistant to antibiotics and or they can result from common forms of infectious agents that reside on individuals who have abnormal or weaker than normal abilities to resist common skin infections.

[0097] A “restriction fragment” refers to a fragment of an oligonucleotide generated by a restriction endonuclease (an enzyme that cleaves phosphodiester bonds within an oligonucleotide chain) that cleaves DNA in response to a recognition site on the DNA. The recognition site (restriction site) consists of a specific sequence of nucleotides typically about 4-8 nucleotides long.

[0098] “Sequence identity” refers to the percent identity between two oligonucleotides or two polypeptide moieties. Genes that share a high sequence identity or similarity support the hypothesis that they share a common ancestor and are therefore homologous. Sequence homology may also indicate common function. Two DNA, or two polypeptide sequences are similar to each other and may be homologous when the sequences exhibit at least about 80%, 81%, 82%, 83%, 84%, 85%, 86%, 87%, 88%, 89%, preferably at least about 90%, 91%, 92%, 93%, 94% and most preferably at least about 95%, 96%, 97%, 98%, 99%, 99.5%, 99.9% sequence identity over a defined length of the molecules. As used herein, sequence identity also refers to sequences showing complete identity (100% sequence identity) to the specified DNA or polypeptide sequence.

[0099] “Skin infections,” means any infection caused by any of the following: Staph infections, MRSA infections, SSI, or any other infection that involves the skin and or that extends to other structures within the skin, and especially rupture or penetration of the skin. A skin infection includes the infections listed under the definitions of MRSA and SSI infections. For “resistant skin infections,” see definition above.

[0100] SSI can appear as an abscess, infection or inflammation of the skin often associated with a wound and sometimes a surgical would. An SSI can be, but is not always, caused by a MRSA infection. An SSI is associated with a surgical incision usually caused by surgery. An SSI is an infection of the skin near the site of a wound to the skin. Of special interest here are SSIs that are persistent and difficult to treat, known herein as PDT SSIs.

[0101] “Staph” refers to the genus of bacteria called Staphylococcus. Staph infections sometimes cause boils, furuncles, impetigo, abscesses, food poisoning, mastitis, pneumonia, osteomyelitis, endocarditis, bacteremia, sepsis, cellulitis and toxic shock syndrome. All of these and related diseases may be affected by the disclosures here. One species of Staph is Staphylococcus aureus. MRSA are Staphylococcus aureus that have become resistant to antibiotics including methicillin, penicillin, amoxicillin, and oxacillin.

[0102] A “template” refers to a target oligonucleotide strand, for example, without limitation, an unmodified naturally-occurring DNA strand, which a polymerase uses as a means of recognizing which nucleotide it should next incorporate into a growing strand to polymerize the complement of the naturally-occurring strand. Such a DNA strand may be single-stranded or it may be part of a double-stranded DNA template. In applications of the present invention requiring repeated cycles of polymerization, e.g., the polymerase chain reaction (PCR), the template strand itself may become modified by incorporation of modified nucleotides, yet still serve as a template for a polymerase to synthesize additional oligonucleotides.

[0103] A “thermocyclic reaction” is a multi-step reaction wherein at least two steps are accomplished by changing the temperature of the reaction.

[0104] A “variance” is a difference in the nucleotide sequence among related oligonucleotides. The difference may be the deletion of one or more nucleotides from the sequence of one oligonucleotide compared to the sequence of a related oligonucleotide, the addition of one or more nucleotides or the substitution of one nucleotide for another. The terms “mutation,” “polymorphism” and “variance” are used interchangeably herein. As used herein, the term “variance” in the singular is to be construed to include multiple variances; i.e., two or more nucleotide additions, deletions and/or substitutions in the same oligonucleotide.

[0105] A “single nucleotide polymorphism” or “SNP” refers to a variation in the nucleotide sequence of an oligonucleotide that differs from another related oligonucleotide by a single nucleotide difference. For example, without limitation, exchanging one A for one C, G or T in the entire sequence of oligonucleotide constitutes a SNP. It is possible to have more than one SNP in a particular oligonucleotide. For example, at one position in an oligonucleotide, a C may be exchanged for a T, at another position a G may be exchanged for an A and so on. When referring to SNPs, the oligonucleotide is most often DNA. SNPs can be found in coding regions of the genome (i.e., within an exon) or non-coding intragenic (i.e., in an intron) or intergenic regions. In this application we have identified 13 special SNPs and they may be referred to by their position relative to the other nucleotides in the gene they are in or near, as a SNP that is either normal or one that indicates a greater risk of developing MRSA infection after exposure to MRSA and they may be identified by their relative position or locus, or their “critical SNP position”, that is where in the gene or probe oligonucleotide they are known to exist.

[0106] RNA sequences within the scope of the invention are derived from the DNA sequences, by thymidine (T) in the DNA sequence being considered equal to uracil (U) in RNA sequences.

[0107] “Subject” or “Patient” as used herein refers to a mammal, preferably a human, in need of diagnosis and/or treatment for a condition, disorder or disease.

[0108] Unless otherwise defined, all technical and scientific terms used herein have the same meaning as commonly understood by one of ordinary skill in the art of molecular biology. Although methods and materials similar or equivalent to those described herein can be used in the practice or testing of the present invention, suitable methods and materials are described herein.

[0109] Brief Description of the Sequences Listed in the Specification

[0110] SEQ ID NO 1 is the full sequence of the Fam129B gene which shows the MRSA SNP, an A or adenine, at position 17460, indicating those with a high risk of a MRSA or SSI infection. The sequence contains 73,651 nucleotides.

[0111] SEQ ID NO 2 is the full sequence of the Fam129B gene which shows the control SNP, a C or cytosine, at position 17460, indicating those at normal risk of a MRSA or SSI infection. The sequence contains 73,651 nucleotides.

[0112] SEQ ID NO 3 is a partial sequence of the Fam129B gene which shows an A or adenine at the 17^{th} position in the partial gene sequence for those with a high risk of a MRSA or SSI infection. The sequence contains 33 nucleotides.

[0113] SEQ ID NO 4 is a partial sequence of the Fam129B gene which shows a C or cytosine at the 17^{th} position in the partial gene sequence for those at normal risk of a MRSA or SSI infection. The sequence contains 33 nucleotides.

[0114] SEQ ID NO 5 is the full gene sequence of the RBM6 gene which shows that at position 26162, the variable “n” can be either C (cytosine) or G (guanine). C is high risk and G is normal. The sequence contains 137,212 nucleotides.

[0115] SEQ ID NO 6 is a partial gene sequence of the RBM6 gene which shows a C or cytosine at the 26^{th} position in the partial gene sequence for those with a high risk of MRSA or SSI (control). The sequence contains 51 nucleotides.

[0116] SEQ ID NO 7 is a partial gene sequence of the RBM6 gene which shows a G or guanine at the 26^{th} position in the partial gene sequence for those at normal risk of MRSA or SSI (control). The sequence contains 51 nucleotides.

[0117] SEQ ID NO 8 is the full gene sequence of the KANK 4 gene which shows at position 76547, the variable “n” can be either G (guanine) or T (thymine). G is high risk and T is normal. The sequence contains 83,248 nucleotides.

[0118] SEQ ID NO 9 is a partial gene sequence of the KANK 4 gene which shows a G or guanine at the 26^{th} position in the partial gene sequence for those with a high risk of developing MRSA or SSI. The sequence contains 51 nucleotides.

[0119] SEQ ID NO 10 is a partial gene sequence of the KANK 4 gene which shows a T or thymine at the 26^{th} position in the partial gene sequence for those at normal risk of developing MRSA or SSI. The sequence contains 51 nucleotides.

[0120] SEQ ID NO 11 is the full gene sequence of the uncharacterized protein C10orf35 isoform X1 gene, plus additional nucleotides beyond the C10orf35 isoform X1 gene up to and including 500 nucleotides beyond SNP/rs2642572. SEQ ID NO 11 terminates before the beginning of the Col 13A1 gene. SEQ ID NO 11 has the nucleotides for the C10orf35 isoform XI as the first 3,353 nucleotides, followed by 155,813 nucleotides before the SNP, the SNP is at position 159,166 of SEQ ID NO 11 and then there are 500 more nucleotides in this sequence. It shows that at position 159166, the variable “n” can be either G (guanine) or A (adenine). G is high risk and A is normal. The sequence contains 159,666 nucleotides.

[0121] SEQ ID NO 12 is a partial gene sequence of SEQ ID NO 11 which shows a G or guanine at the 26^{th} position in the partial gene sequence for those with a high risk of developing MRSA or SSI. The sequence contains 51 nucleotides.

[0122] SEQ ID NO 13 is a partial gene sequence of SEQ ID NO 11 which shows an A or adenine at the 26^{th} position in the partial gene sequence for those at normal risk of developing MRSA or SSI. The sequence contains 51 nucleotides.

[0123] SEQ ID NO 14 is the full gene sequence of the Col 19A1 gene which shows that 1) at position 151755, the variable “n” can be either A (adenine) or G (guanine); 2) at position 152225, N can be either T (thymine) or C (cytosine); 3) at position 162547, N can be either G (guanine) or A (adenine); 4) at position 162830, N can be either G (guanine) or A (adenine); and 5) at position 163341, N can be either T (thymine) or G (guanine). The sequence contains 345,899 nucleotides.

[0124] SEQ ID NO 15 is a partial gene sequence of the Col 19A1 gene which shows a T or thymine at the 21^{st} position in the partial gene sequence for those with a high risk of MRSA or SSI. The sequence contains 41 nucleotides.

[0125] SEQ ID NO 16 is a partial gene sequence of the Col 19A1 gene which shows a G or guanine at the 21^{st} position in the partial gene sequence for those at normal risk of MRSA or SSI. The sequence contains 41 nucleotides.

[0126] SEQ ID NO 17 is a partial gene sequence of the Col 19A1 gene which shows a G or guanine at the 26^{th} position in the partial gene sequence for those with a high risk of MRSA or SSI. The sequence contains 51 nucleotides.

[0127] SEQ ID NO 18 is a partial gene sequence of the Col 19A1 gene which shows an A or adenine at the 26^{th} position in the partial gene sequence for those at normal risk of MRSA or SSI. The sequence contains 51 nucleotides.

[0128] SEQ ID NO 19 is a partial gene sequence of the Col 19A1 gene which shows a G or guanine at the 26^{th} position in the partial gene sequence for those with a high risk of MRSA or SSI. The sequence contains 51 nucleotides.

[0129] SEQ ID NO 20 is a partial gene sequence of the Col 19A1 gene which shows an A or adenine at the 26^{th} position in the SNP for those at normal risk of MRSA or SSI. The sequence contains 51 nucleotides.

[0130] SEQ ID NO 21 is a partial gene sequence of the Col 19A1 gene which shows a T or thymine at the 26^{th} position in the SNP for those with a high risk of MRSA or SSI. The sequence contains 51 nucleotides.

[0131] SEQ ID NO 22 is a partial gene sequence of the Col 19A1 gene which shows a C or cytosine at the 26^{th} position in the partial gene sequence for those at normal risk of MRSA or SSI. The sequence contains 51 nucleotides.

[0132] SEQ ID NO 23 is a partial gene sequence of the Col 19A1 gene which shows an A or adenine at the 26^{th} position in the partial gene sequence for those with a high risk of MRSA or SSI. The sequence contains 51 nucleotides.

[0133] SEQ ID NO 24 is a partial gene sequence of the Col 19A1 gene which shows a G or guanine at the 26^{th} position in the partial gene sequence for those at normal risk of MRSA or SSI. The sequence contains 51 nucleotides.

[0134] SEQ ID NO 25 is the full gene sequence of the IGSF8 gene which shows at position 6692, the variable “n” can be either G (guanine) or A (adenine). G is high risk and A is normal. The sequence contains 7,521 nucleotides.

[0135] SEQ ID NO 26 is a partial gene sequence of the IGSF8 gene which shows a G or guanine at the 26^{th} position in the partial gene sequence for those with a high risk of MRSA or SSI. The sequence contains 51 nucleotides.

[0136] SEQ ID NO 27 is a partial gene sequence of the IGSF8 gene which shows an A or adenine at the 26^{th} position in the partial gene sequence for those at normal risk of MRSA or SSI. The sequence contains 51 nucleotides.

[0137] SEQ ID NO 28 is the full gene sequence of the ADARB2 gene which shows at position 223202, the variable “n” can be either A (adenine) or G (guanine). A is high risk and G is normal. The sequence contains 560,186 nucleotides.

[0138] SEQ ID NO 29 is a partial gene sequence of the ADARB2 gene which shows an A or adenine at the 21^{st} position in the partial gene sequence for those with a high risk of MRSA or SSI. The sequence contains 41 nucleotides.

[0139] SEQ ID NO 30 is a partial gene sequence of the ADARB2 gene which shows a G or guanine at the 21^{st} position in the partial gene sequence for those at normal risk of MRSA or SSI. The sequence contains 41 nucleotides.

[0140] SEQ ID NO 31 is the full gene sequence of the DCT gene which shows at position 81032, the variable “n” can be either C (cytosine) or T (thymine). C is high risk and T is normal. The sequence contains 112,962 nucleotides.

[0141] SEQ ID NO 32 is a partial gene sequence of the DCT gene which shows a C or cytosine at the 22^{nd} position in the partial gene sequence for those with a high risk of MRSA or SSI. The sequence contains 43 nucleotides.

[0142] SEQ ID NO 33 is a partial gene sequence of the DCT gene which shows a T or thymine at the 22^{nd} position in the partial gene sequence for those at normal risk of MRSA or SSI. The sequence contains 43 nucleotides.

[0143] SEQ ID NO 34 is the full gene sequence of the CCR2 gene, Chr3: 46,353,744-46,360,940. The sequence contains 14,394 nucleotides.

[0144] SEQ ID NO 35 is the gene sequence which starts at position 46,360,941 (which is the first nucleotide after the end of the CCR2 gene) and ends at position 46,425,932; the SNP/rs4619820 is contained between these positions, after the CCR2 gene but before the LTF gene. This sequence includes all the nucleotides after the CCR2 gene, up to and including the SNP and an additional 500 nucleotides. The LTF gene downstream of this sequence is not included. The LTF gene is also in Chr 3, spanning Chr3: 46,436,005-46,465,142. The SNP is located at position 64492 of SEQ ID NO 35, the variable “n” can be either G (guanine) or A (adenine). G is high risk and A is normal. SEQ ID NO 35 contains 64,992 nucleotides.

[0145] SEQ ID NO 36 is a partial gene sequence of SEQ ID NO 35 which shows a G or guanine at the 26^{th} position in the partial gene sequence for those with a high risk of MRSA or SSI. The sequence contains 51 nucleotides.

[0146] SEQ ID NO 37 is a partial gene sequence of SEQ ID NO 35 which shows an A or adenine at the 26^{th} position in the partial gene sequence for those at normal risk of MRSA or SSI. The sequence contains 51 nucleotides.

[0147] In the sequence listing we provide the full length of natural gene sequences, and artificial fragments, probes both large and small, and fragments of various genetic regions that either include or bracket the single nucleotide polymorphisms, known as SNPs, also known as critical SNP nucleotides that have a locus at a critical SNP position, and they are an important component in identifying both individuals at high risk of developing a MRSA infection and individuals that are not at high risk of developing a MRSA infection but who might normally be placed in that category. We provide genetic sequences, some identical, some artificial, that bracket the site of these SNPs, or “critical SNP positions.” The precise sequences we provide are usually relatively short sequences that identify those unique critical nucleotides (SNPs) that we have discovered are useful to determine whether a person is one of what we say are two possible types of individuals. One type is what we refer to here as a “normal” also referred to herein as a “control” and sometimes as a “low risk” individual, this is a person who is NOT predisposed to develop repeated and multiple MRSA infections after a single exposure to the MRSA bacteria. Rather, a control, normal or low risk person has a typically low chance of developing a MRSA infection after exposure to MRSA. And more importantly when a control or typical person does have a MRSA infection, it can be treated and cured relatively easily and without relapse. The majority of people exposed to MRSA, once treated, do not repeatedly redevelop a MRSA infection. The majority of people are what we call normal, control or low risk and if are exposed MRSA, and get a MRSA infection and they get a standard treatment, usually with antibiotics, they recover and they may never have a similar infection again. The normal or control is compared and contrasted with what we call here a high risk, high risk, or abnormal individual.

[0148] Evaluating the MRSA and SSI High Risk Patient

[0149] We describe methods of evaluating patients to determine if they are at increased risk of developing an infection from MRSA or SSI. Even patients who have no previously known risk factors or observable indications, symptoms or complaints of an infection and without any history of being resistant to MRSA or SSI may be at high risk of developing a MRSA infection. Also important we describe how to identify those patients who might have some or all of the risk factors that would ordinarily put a patient on the high risk watch and prevent list but who in fact is not at high risk of developing a MRSA or SSI infection. Using the procedures, tests and materials described herein, a caregiver will be able to better predict and assess what an individual patient's true level of risk really is, and then act to accordingly, either to prevent a risk that is there, or in some cases, to save the resources that would likely be wasted to prevent a risk that is actually a normal risk but falsely seems high because of the standard risk factors. Using the steps and procedures described herein health care providers can better determine when certain steps should be taken or administered to prevent patients from becoming infected with MRSA and SSI, even though the patient may have none of the previously known risk factors of developing MRSA or SSI. We describe and claim these procedures, tests and materials.

[0150] Until now there have been no generally accepted methods to test an individual's susceptibility to getting a MRSA infection. Now we can describe how to find, test and use over a dozen unique nucleotide polymorphisms, which if properly sampled and evaluated, can lead to accurate predictions of which individuals are more likely to be sickened by a MRSA infection than are “control” or “normal” individuals that are not at a higher risk of developing the disease. As a consequence, the susceptible individuals that can now be identified can be given better care in order to better prevent susceptible individuals from becoming sick and thus prevent or reduce the spread of this sometimes deadly disease. We describe the various unique SNPs as well as unique combinations of these genetic polymorphisms or (Genetic Marker Combinations) and how they can be used to predict a patient's risk and to administer prophylactic treatment or preventative steps.

[0151] It should be understood that most SNPs in a human's gene do not indicate or reveal anything useful or special to a physician. For example, in one of the genes we discuss here, the KANK4 gene, it is estimated that there are 4,600 SNPs in the KANK4 gene alone. We believe only 1 of those 4600 SNPs, just one base nucleotide, is an indicator, or critical SNP or a risk factor for that person getting a MRSA or SSI infection following exposure to the MRSA bacteria. Knowing this SNP exists and how to use it and determining which SNP it is and where that SNP is in the genome and how it can be used as an indicator of MRSA susceptibility as to assist in treatment and in making the lives of individuals born with a predisposition of getting MRSA infections is just one important aspect of the invention and claims described here. Further, referring again to our KANK4 gene example, if only 1000 base pairs around the site of the SNP were analyzed (500 bases before and 500 after) one would find about 48 other SNPs in that 1000 base pair region, that had nothing to with MRSA or SSI susceptibility. This is the “noise” that hides the existence and position of these valuable SNPs. These SNPs and their critical SNP position and nucleotide can be thought of as hidden signals. The hidden signals can't be seen or heard and until now they couldn't be detected. They are revealed here and we teach how they can be used. And those averages of about 4,600 SNPs in the KANK4 gene alone are just the number of SNPs in just one single gene. Altogether the KANK4 gene has about ˜83 kbases in total. We suspect that ratio, about 4,800 SNPs for every 83,000 bases that have no relationship at all to MRSA or SSI susceptibility, is an average ratio of SNP per base pair for all the genes we describe here. This is the “noise” ratio. We did not examine the other genes presented here to precisely determine the total number of SNPs, but we believe, to a scientific certainty, that the other genes discussed here would most likely have an equally high level of total SNPs present if the size of the other genes was similar to the size of the KANK4 gene. In this case, neither the SNPs nor the genes where the SNPs are located (either in or near) have been previously identified as holding a SNP that indicates a greater susceptibility to a MRSA infection. We teach how these previously secret and unknown SNPs can be heard and the individuals who have them identified, over and in spite of all the SNP noise in a genome, and then used for this one specific purpose in order to better prevent infections and save lives.

[0152] Once a susceptible patient has been identified, preventive steps can be taken such as placing people who are susceptible to MRSA or SSI in an environment that limits their exposure to MRSA such as isolation from others, and treatment with MRSA medications, including preventive or prophylactic treatments, in order to protect the patient and to prevent the spread of MRSA. When surgery is contemplated a person at high risk of SSI may be given special prophylactic treatment and medicines and appropriate palliative care. Contaminated surfaces and laundry items can be more thoroughly disinfected. People visiting or caring for susceptible people may be required to wear protective garments and follow strict hygiene procedures.

[0153] The invention is also of great importance in order to identify those who are NOT susceptible or at increased risk of developing MRSA or SSI. Use of these probes and materials can save time, money, effort and resources that could otherwise be wasted taking extreme measures protecting a patient and performing other preventive steps, when they are not needed, trying to prevent a disease that is not likely to develop even without preventive measures. It can be a large waste of time, money and effort to put a patient in isolation that doesn't need to be in isolation.

[0154] The SSI and MRSA Family of SNPs Related to Skin and Staph Infections

[0155] We describe a family of SNPs or genetic markers, that if present in an individual, either individually or in combination, indicates a greater than normal risk or greater than normal chance that the individual with the SNP or marker might develop MRSA or SSI if exposed to the bacteria that cause MRSA or SSI. Most of the SNPs we describe are within genes but two SNPs are between genes. The SNPs or markers we describe are in or near the following genes: FAM 129B (1 SNP), RBM6 (1 SNP), KANK 4 (1 SNP), Col 13A1-close (1 SNP), COL 19A1 (5 SNPs), IGSF8 (1 SNP), ADARB2 (1 SNP), DCT (1 SNP), and the last SNP lies between genes LTF and CCRL-2. The number in parenthesis is the number of SNPs associated with that gene.

[0156] The SNPs in this document are given a unique number and those SNP numbers are:

“a1” is known as SNP/rs2249861 and it is within the FAM 129B gene;
“b2” is known as SNP/rs2352969 and it is within the RBM6 gene;
“c3” is known as SNP/rs12758910 and it is within the KANK 4 gene;
“d4” is known as SNP/rs2642572 and it is outside and between two genes, the C10orf35 isoform X1 gene and the Col 13A1 gene;
“e5” is known as SNP/rs3793038 and it is within the Col 19A1 gene;
“f6” is known as SNP/rs3805987 and it is within the Col 19A1 gene;
“g7” is known as SNP/rs9454944 and it is within the Col 19A1 gene;
“h8” is known as SNP/rs978291 and it is within the Col 19A1 gene;
“i9” is known as SNP/rs978290 and it is within the Col 19A1 gene;
“j10” is known as SNP/rs1131891 and it is within the IGSF8 gene;
“k11” is known as SNP/rs127711411 and it is within the ADARB2 gene;
“l12” is known as SNP/rs4773794 and it is within the DCT gene; and
“m13” is known as SNP/rs4619820 and it is outside and between two genes, CCR2 and LTF.

[0157] Any single SNP or any combination of two or more of the above SNPs, when present in an individual and characterized as a MRSA high risk SNP, can function as a component of an indicator system (i.e., a critical high risk SNP) that can lead to the conclusion that the individual is at increased, and greater than normal or high risk of acquiring a MRSA or SSI, should the person be exposed to MRSA or should they have an invasive surgical procedure. Collectively these 13 SNPs may be thought of as genetic risk factors. Genetic risk factors are in contrast to traditional factors such as exposure and prior disease history. In one embodiment of the invention, the SNPs, or markers are additive and the more markers an individual has, the greater the chance of acquiring a MRSA or an SSI. In one embodiment of the invention the markers are less than additive, and the more markers an individual has does not significantly increase the chance of acquiring a MRSA or an SSI once a single marker is established. In one embodiment of the invention the markers are partially additive, and the more markers an individual has the greater the chance of acquiring a MRSA or SSI, but each additional marker does not add the same weight to the chance of acquiring a MRSA or SSI as an individual with one fewer marker. In one embodiment of the invention the markers are selective, and the more markers an individual has the greater the chance of acquiring a MRSA or SSI infection, but not every marker or SNP adds the same degree of increase in risk, and some markers appear not to be relevant for different types of MRSA.

[0158] It is the presence or absence of these SNPs aka genetic markers, aka critical SNP nucleotides, either alone or in combinations, that becomes one of the factors in trying to determine how likely it is that an individual will develop MRSA or SSI, in addition to types of exposure, medical history and sometimes other factors. The presence or absence of these genetic markers in combination with different preventive or treatment options makes these nucleotide bases important for identification of susceptible individuals and the treatment of possibly lethal bacterial infections. It is important to note that the SNPs discussed here may have other purposes. The 13 SNPs listed by number letter and with unique SNP “rs” numbers may or may not play critical roles in other diseases or health issues unrelated to skin and Staph infections, for example, medical conditions associated with Alzheimer's, stomach illness, neurological or pulmonary disease may be completely unrelated to the SNPs identified here even though they also appear to be associated with other conditions. We are not commenting on or claiming the application of these SNPs to unrelated conditions or diseases. The disclosed SNPs are open for other studies, correlations, uses, interpretations and further investigations. We do assert these SNP have application beyond MRSA but may also apply to SSI.

[0159] Each polymorphism (SNP) that indicates a susceptibility to MRSA infection and its gene or location is identified and discussed below. The SNP information below provides the “indicator positions” or “critical SNP positions” of SNPs “a1” to “m13” and it explains what nucleotide bases are “controls” or “normal” and what nucleotide bases are indicative of greater risk of acquiring a MRSA infection, for each critical SNP position.

[0160] The “a1” SNP.

[0161] SNP/rs2249861 or “a1” is within the FAM 129B Gene.

[0162] The gene known as FAM 129B encodes a protein that has a predicted molecular mass of 83 kDa, and contains a pleckstrin homology domain and a proline-rich region that contains six serine phosphorylation sites (Chen et al (2011) J. Biol. Chem. 286(12):10201-10209; Old et al. (2009) Mol. Cell 34: 115-131). Phosphorylation has been associated with MAP kinase signaling cascade; in melanoma cells the MAP kinase pathway was active and the FAM129B protein was localized throughout the cytoplasm. When the MAP kinase pathway was inhibited, the FAM129B protein migrated to the cell membrane and melanoma cell migration through a collagen matrix was inhibited. (Old et al., p. 125). Subsequent work found that FAM129B was cytoplasmically localized in actively growing HeLa cells, but appeared to be localized at cell-cell junctions on the plasma membrane when the HeLa cells achieved confluence, and throughout the cell membrane during telophase. (Chen et al. pp. 10203-10204.) FAM129B also inhibited apoptosis in HeLa cells treated with TNFα or CHX, compared with knockdown FAM129B HeLa cells silenced with siRNA sequences specific to FAM129B. A recent investigation of the corresponding Fam129B protein in mice showed that Fam129B is expressed in the epidermal keratinocytes in embryonic and adult mice. Fam129B-knockout mice exhibited delayed wound healing and had altered expression of several wound-repair and cell-motility related genes (Oishi et al. (published online Sep. 11, 2012), J. Biochem. doi:10.1093/jb/mvs100).

[0163] In our studies all participants for this allele were homozygous; however we expect to find and have data to support our finding that both homozygous and nonhomozygous individuals for this and other alleles are at greater risk of developing MRSA or SSI if they have even one of two alleles that have a “MRSA indicated risk factor nucleotide”. In the case of the “a1” SNP it has an A or adenine in the high risk SNP position when compared to those who are normal. The full gene sequence of Fam129B with A or adenine at position 17 indicating greater risk of a MRSA or SSI infection is in SEQ ID NO 1. “Normals” or “controls” are those not at greater risk of developing MRSA or SSI, in the case of the “a1” SNP that means they have a C or cytosine in this SNP position. The full gene sequence of Fam129B with C or cytosine at position 17 indicating normal risk of a MRSA or SSI infection also called a control, see SEQ ID NO 2. See sequence below for the Fam129B SNP where both MRSA susceptible and control are described with shorter sequences.

[0164] The precise location of the SNP within the Fam129B gene is indicated here and in the sequence listing. The SNP can be identified and located using the sequences or fragments of the sequences provided below or using the information in the sequence listing which identifies and places the SNP within the full gene sequence. SEQ ID NOs 1 and 2 have the full Fam129B sequence. SEQ ID NO 1 shows the MRSA SNP and SEQ ID NO 2 shows the control SNP. Related sequences or probes could be made by one skilled in the art. The complete sequence of the Fam129B gene is in the sequence listing and the polymorphism for the partial gene sequence of SEQ ID NOs 3 and 4 are indicated at position 17 and the nucleotide is defined as being either an A (infection risk more likely) or a C (infection risk normal or control.) See the sequence below for the indicator SNP or critical SNP located within the Fam129B gene. SEQ ID NO 3 shows an A or adenosine (bracketed) for those with an increased risk of MRSA and SEQ ID NO 4 (control) shows a C or cytosine (bracketed) in the SNP position for those not with an increased risk of developing MRSA or SSI. If the reference allele is identified as MRSA then a person who has the high risk nucleotide in this position is at greater than normal risk of developing MRSA or SSI. SNP/rs2249861 or “a1”

| Reference | Affymetrix |
|---|---|
| allele | and GRCh38.p2 Primary Assembly Sequence |
| MRSA | GGGGGCAAGT TAGTCA[A]CCT GTCTGAGTCT TAG |
| | (SEQ ID NO 3) |
| Controls | GGGGGCAAGT TAGTCA[C]CCT GTCTGAGTCT TAG |
| | (SEQ ID NO 4) |

[0165] Fam129B sequence above shows the SNP in brackets. Features of Fam129B (SNP/rs2249861) MRSA patients.

[0166] Note that SEQ ID NOs 1 and 2 provide the full gene sequence for the Fam129B gene, MRSA susceptible in SEQ ID NO 1 and the control or normal in SEQ ID NO 2. For the remainder of the SNPs we only provide 1 sequence for the full gene sequence for the gene and we describe where in the full gene sequence the SNP can be found and the location of the SNP and what nucleotide is present in normals or controls and what nucleotide is present in the MRSA or SSI susceptible person.

[0167] The “b2” SNP.

[0168] SNP/rs2352969 or “b2” is within the RBM6 Gene.

[0169] This gene, also called “RNA Binding Motif 6,” is a tumor suppressor gene (See SEQ ID NO 5) that can promote cell growth and it may be involved in wound healing. Individuals are usually homozygous for this allele but both homozygous and nonhomozygous individuals are at greater risk of developing MRSA or SSI if they have a C or cytosine in the SNP position when compared to those who are normal. “Normals” or “controls” are those not at greater risk of developing MRSA or SSI, and they have a G or guanine in this SNP position. See sequence and reference sequence below for the RBM6 SNP where both MRSA susceptible and control are described.

[0170] The precise location of the SNP within the RBM6 gene is indicated below and in the sequence listing. The SNP can be identified and located using the sequences or fragments of the sequences provided below or using the information in the sequence listing which identifies and places the SNP within the full gene sequence. Related sequences or probes could be made by one skilled in the art. The complete sequence of the RBM6 gene is provided in the sequence listing, with the polymorphism indicated at position 26162 and the nucleotide is defined as being either a C or a G. See the sequence below which shows the region around and the SNP located within the RBM6 gene. SEQ ID NO 6 has a C or cytosine (bracketed) in the SNP position for those with an increased risk of MRSA or SSI and SEQ ID NO 7 (control) shows a G or guanine (bracketed) for those not at increased risk of MRSA. See MRSA sequence and control sequence below for the RBM6 SNP where both MRSA susceptible and control are indicated.

[0171] If the reference allele is labeled MRSA then a person who has the bracketed nucleotide in this position is at greater than normal risk of developing MRSA or SSI.

[0172] SNP/rs2352969 or “b2”

| Reference | Affymetrix |
|---|---|
| allele | and GRCh38.p2 Primary Assembly Sequence |
| MRSA | TCTTGAACTG AGTGACCCAG AATCA[C]TTGT |
| | CCTTTGAATT TTAGTATAGT A (SEQ ID NO 6) |
| Controls | TCTTGAACTG AGTGACCCAG AATCA[G]TTGTT |
| | CCTTTGAATT TTAGTATAGT A (SEQ ID NO 7) |

[0173] RBM6 sequence above, see SNP in brackets. Features of RBM6 (SNP/rs2352969) MRSA patients: 10 of 11 are homozygous for the allele; 1 is heterozygous. Affymetrix and GRCh38.p2 Primary Assembly Sequence.

[0174] The “c3” SNP.

[0175] SNP/rs12758910 or “c3” within the KANK 4 Gene.

[0176] The gene known as KANK 4 is a homologue of genes involved in the regulation of actin polymerization and cell motility. Individuals are usually homozygous for this allele but both homozygous and nonhomozygous individuals are at greater risk of developing MRSA or SSI if they have a G or guanine in the SNP position when compared to those who are normal. “Normals” or “controls” are those not at greater risk of developing MRSA or SSI, if they have a T or thymine in this SNP position. See MRSA sequence and control reference sequence below for the KANK 4 SNP where both MRSA susceptible and control are described.

[0177] The precise location of the SNP within the KANK 4 gene is indicated below and in the sequence listing. The SNP can be identified and located using the sequences or fragments of the sequences provided below or using the information in the sequence listing which identifies and places the SNP within the full gene sequence. Related sequences or probes could be made by one skilled in the art. The complete sequence of the KANK 4 gene is in the sequence listing as SEQ ID NO 8 and the polymorphism is indicated at position 76547 and the nucleotide at this position is either a G or a T. See the sequence below for the indicator SNP or critical SNP located within the KANK 4 gene. SEQ ID NO 9 shows a G or guanine (bracketed) in the SNP position for those with an increased risk of developing MRSA or SSI. SEQ ID NO 10 (control) shows a T or thymine (bracketed) for those not at increased risk of MRSA. If the reference allele is labeled MRSA then a person who has the bracketed nucleotide in this position is at greater than normal risk of developing MRSA or SSI.

[0178] SNP/rs12758910 or “c3”

| Reference | Affymetrix |
|---|---|
| allele | and GRCh38.p2 Primary Assembly Sequence |
| MRSA | CACCTGCCAA GACAGAGACT GGAGA[G]AAAG |
| | CCTCACTTGC AGAGAACCAGC (SEQ ID NO 9) |
| Controls | CACCTGCCAA GACAGAGACT GGAGA[T]AAAG |
| | CCTCACTTGCA GAGAACCAGC (SEQ ID NO 10) |

[0179] KANK 4 sequence above shows the SNP in brackets. Features of KANK 4 (SNP/rs12758910) MRSA patients: 10 of 11 are homozygous for the G allele; 1 is heterozygous. Controls: 2 of 3 are homozygous for the T allele; 1 is heterozygous.

[0180] The next group of markers is what we call the “collagen markers” or collagen SNPs. The collagen markers are the following: “d4” known as SNP/rs2642572; “e5” known as SNP/rs3793038; “f6” known as SNP/rs3805987; “g7” known as SNP/rs9454944; “h8” known as SNP/rs978291; and “i9” known as SNP/rs978290 are all within either the Col 13A1 gene (“d4”) or the Col 19A1 gene (“e5, f6, g7, h8 and i9”) both genes code for collagen. These 6 critical SNPs in some respects behave the same but in other respects may behave differently from the other markers we have identified here, but they are still associated with SSI or MRSA infections. They may be thought of as belonging to their own unique group. This group of genes is known for making proteins related to collagens, which are involved with cartilage, bone, tendon and skin.

[0181] The “d4” SNP.

[0182] SNP/rs2642572 or “d4” Between the C10orf35 Isoform X1 Gene and the Col 13A1 Gene.

[0183] The gene known as Col 13A1 is a gene that codes for collagen, a major component of the skin. Individuals are usually homozygous for this allele but both homozygous and nonhomozygous individuals have a greater risk of developing MRSA or SSI if they have a C or cytosine in the SNP position when compared to those who are normal. The full sequence for the C10orf35 isoform X1 gene is provided in SEQ ID NO 11. See sequence and reference sequence below for d4 or SNP/rs2642572 where both MRSA susceptible and control are described.

[0184] The precise location of the SNP associated with the C10orf35 isoform X1 gene is indicated below and in the sequence listing of the full gene, SEQ ID NO 11. The polymorphism is indicated at position 159166 of the full gene and the nucleotide at that position is defined as being either a G or an A. The SNP in a patient can be identified and located using the sequences or fragments of the sequences provided in the sequence below, or SNP/rs2642572. SEQ ID NO 11 shows the SNP within the full gene sequence. Related sequences or probes could be made by one skilled in the art. See the sequence below for the indicator SNP, or critical SNP, located outside of the C10orf35 isoform X1 gene. SEQ ID NO 12 shows a G or guanine (bracketed) present in the partial gene sequence at the 26^{th} position for those with an increased risk of developing MRSA and or SSI (MRSA). SEQ ID NO 13 (control) shows an A or adenine (bracketed) is present in the partial gene sequence at the 26^{th} position for those not at increased risk of MRSA. If the reference allele is labeled “MRSA” then a person who has the bracketed nucleotide in this position is at greater than normal risk of developing MRSA or SSI.

[0185] SNP/rs2642572 or “d4”

| Reference | |
|---|---|
| allele | GRCh38.p2 Primary Assembly Sequence |
| MRSA | GCTGCAGGAG CCTCCAACAA AGCCA[G]ACTG |
| | TGACAGGGTG GAACCCCAGA G (SEQ ID NO 12) |
| Controls | GCTGCAGGAG CCTCCAACAA AGCCA[A]ACTG |
| | TGACAGGGTG GAACCCCAGA G (SEQ ID NO 13) |

[0186] C10orf35 isoform X1 (SNP/rs2642572) sequence above, see SNP in brackets. Features of SNP/rs2642572, it has 155853 bp at 5′ side: uncharacterized protein C10orf35 isoform X1. 12512 bp at 3′ side: collagen alpha-1(XIII) chain isoform 19. Affymetrix annotated SNP as the reverse complement compared to the GRCh38.p2 Primary Assembly; therefore, Affymetrix allele A is GRCh38.p2 Primary Assembly allele T, and Affymetrix allele G is GRCh38.p2 Primary Assembly allele C. MRSA patients: 11 of 11 are homozygous for the C allele Controls: 1 of 3 are homozygous for the T allele; 2 are heterozygous.

[0187] The “e5, f6, g7, h8 and i9” SNPs.

[0188] The Col 19A1 Gene “e5, f6, g7, h8 and i9”.

[0189] The Col 19A1 gene is similar in function to Col 13A1, because it also codes for collagen. However Col 19A1 is different from the other genes reported here because it has 5 SNPs associated with MRSA risk that, either individually or in combination, is associated with an increased risk of MRSA and or SSI. These 5 SNPs are given the following unique reference numbers: SNP/rs3793038 or “e5” (SNP critical position 163341); SNP/rs3805987 or “f6” (SNP critical position 162830); SNP/rs9454944 or “g7” (SNP critical position 162547); SNP/rs978291 or “h8” (SNP critical position 152225); and SNP/rs978290 or “i9” (SNP critical position 151755) and they are described below.

[0190] These are what we call “collagen markers” and the so called collagen markers are an example of the “not just MRSA” effect. The markers that are called: “e5” known as SNP/rs3793038, “f6” known as SNP/rs3805987, “g7” known as SNP/rs9454944, “h8” known as SNP/rs978291, and “i9” known as SNP/rs978290 are all within the Col 19A1 gene and these 5 critical SNPs may behave differently from the other markers we have identified. They are thought to belong to their own unique group. This group of genes is known for making proteins related to the family of proteins known as collagens which are involved with cartilage, bone, tendon and skin, certainly other uses than acting as a critical SNP for MRSA and we are not suggesting those other uses are claimed here.

[0191] The “e5” SNP.

[0192] SNP/rs3793038 or “e5” is within the Col 19A1 Gene.

[0193] Individuals are usually homozygous for this allele but both homozygous and nonhomozygous individuals have a greater risk of developing MRSA and or SSI if they have a T or thymine in this SNP in this position when compared to those who are normal. “Normals” or “controls” are those not at greater risk of developing MRSA or SSI, and they have a G or guanine in this SNP position. See MRSA sequence and control reference sequence below for the SNP/rs3793038 SNP where both MRSA susceptible and control are described.

[0194] The precise location of SNP/rs3793038 within the Col 19A1 gene is indicated below and in the sequence listing. The SNP can be identified and located using the sequences or fragments of the sequences provided below or using the information in the sequence listing which identifies and places the SNP within the full gene sequence. Related sequences or probes could be made by one skilled in the art. The complete sequence of the Col 19A1 gene is in the sequence listing (SEQ ID NO 14) with the polymorphism indicated at position 163341 and the nucleotide is defined as being either T or G. See the sequence below for the indicator SNP, or critical SNP, (SNP/rs3793038 or e5) located within the Col 19A1 gene. SEQ ID NO 15 shows a T or thymine for those with an increased risk of MRSA or SSI. If the reference allele is labeled “MRSA” then a person who has the bracketed nucleotide in this position is at greater than normal risk of developing MRSA or SSI. SEQ ID NO 16 (control) shows a G or guanine (bracketed) for those not at increased risk of MRSA.

[0195] SNP/rs3793038 or “e5”

| Reference | |
|---|---|
| allele | GRCh38.p2 Primary Assembly Sequence |
| MRSA | TAAAAACAAC ATTTATTAAG [T] GCCTACCGTA |
| | TGCTAAATGT (SEQ ID NO 15) |
| Controls | TAAAAACAAC ATTTATTAAG [G] GCCTACCGTA |
| | TGCTAAATGT (SEQ ID NO 16) |

[0196] SNP/rs3793038 or e5 sequence above, see SNP in brackets. Features of Col 19A1 SNP/rs3793038 are Affymetrix annotated SNP as the reverse complement compared to the GRCh38.p2 Primary Assembly; therefore, Affymetrix allele A is GRCh38.p2 Primary Assembly allele T, and Affymetrix allele C is GRCh38.p2 Primary Assembly allele G.

MRSA patients: 11 of 11 are homozygous for the T allele
Controls: 1 of 3 is homozygous for the G allele; 2 are heterozygous

[0197] The “f6” SNP.

[0198] SNP/rs3805987 or “f6” is within the Col 19A1 Gene.

[0199] Individuals are usually homozygous for this allele but both homozygous and nonhomozygous individuals have a greater risk of developing MRSA and or SSI if they have a G or guanine in this SNP in this position when compared to those who are normal. “Normals” or “controls” are those not at greater risk of developing MRSA or SSI, and they have an A or adenine in this SNP position. See MRSA sequence and control reference sequence below for the SNP/rs3805987 where both MRSA susceptible and control are described.

[0200] The precise location of the SNP/rs3805987 within the Col 19A1 gene is indicated below and in the sequence listing. The SNP can be identified and located using the sequences or fragments of the sequences provided below or using the information in the sequence listing which identifies and places the SNP within the full gene sequence. Related sequences or probes could be made by one skilled in the art. The complete sequence of the Col 19A1 gene is in the sequence listing (SEQ ID NO 14) with this polymorphism indicated at position 162830 and the nucleotide is defined as being either G or A. See the sequence below for the indicator SNP, or critical SNP, (SNP/rs3805987 or f6) located within the Col 19A1 gene. SEQ ID NO 17 shows a G or guanine for those with an increased risk of MRSA or SSI. If the reference allele is labeled “MRSA” then a person who has the bracketed nucleotide in this position is at greater than normal risk of developing MRSA or SSI. SEQ ID NO 18 (control) shows an A or adenine (bracketed) for those not at increased risk of MRSA or SSI.

[0201] SNP/rs3805987 or “f6”

| Reference | |
|---|---|
| allele | GRCh38.p2 Primary Assembly Sequence |
| MRSA | AGCITTTGTC TTGCCTTTAG ATAAC [G] GTTT |
| | CTGCCTCCAC ATTACATGTA G (SEQ ID NO 17) |
| Controls | AGCTTTTGTC TTGCCTTTAG ATAAC [A] GTTT |
| | CTGCCTCCAC ATTACATGTA G (SEQ ID NO 18) |

[0202] SNP/rs3805987 or f6 sequence is above. See SNP in brackets. Features of Affymetrix annotated SNP as the reverse complement compared to the GRCh38.p2 Primary Assembly; therefore, Affymetrix allele C is GRCh38.p2 Primary Assembly allele G, and Affymetrix allele T is GRCh38.p2 Primary Assembly allele A. MRSA patients: 11 of 11 are homozygous for the G allele. Controls: 1 of 3 is homozygous for the A allele; 2 are heterozygous.

[0203] The “g7” SNP.

[0204] SNP/rs9454944 or “g7” is within the Col 19A1 gene.

[0205] Individuals are usually homozygous for this allele but both homozygous and nonhomozygous individuals have a greater risk of developing MRSA and or SSI if they have a G or guanine in this SNP in this position when compared to those who are normal. “Normals” or “controls” are those not at greater risk of developing MRSA or SSI, and they have an A or adenine in this SNP position. See MRSA sequence and reference MRSA sequence below for the SNP/rs9454944 where both MRSA susceptible and control are described.

[0206] The precise location of the SNP/rs9454944 within the Col 19A1 gene is indicated below and in the sequence listing. The SNP can be identified and located using the sequences or fragments of the sequences provided below or using the information in the sequence listing which identifies and places the SNP within the full gene sequence. Related sequences or probes could be made by one skilled in the art. The complete sequence of the Col 19A1 gene is in the sequence listing (SEQ ID NO 14) with the polymorphism indicated at position 162547 and the nucleotide is defined as being either G or A. See the sequence below for the indicator SNP, or critical SNP, (SNP/rs9454944 or g7) located within the Col 19A1 gene. SEQ ID NO 19 shows a G or guanine for those with an increased risk of MRSA or SSI. If the reference allele is labeled “MRSA” then a person who has the bracketed nucleotide in this position is at greater than normal risk of developing MRSA or SSI. SEQ ID NO 20 (control) shows an A or adenine (bracketed) for those not at increased risk of MRSA or SSI.

[0207] SNP/rs9454944 or “g7”

| Reference | Affymetrix |
|---|---|
| allele | and GRCh38.p2 Primary Assembly Sequence |
| MRSA | TATACCAATG CAATCTGTAC TAGAG[G]ATAC |
| | AAAAATATTG AAATCACAAA A (SEQ ID NO 19) |
| Controls | TATACCAATG CAATCTGTAC TAGAG[A]ATAC |
| | AAAAATATTG AAATCACAAA A (SEQ ID NO 20) |

[0208] Sequence of SNP/rs9454944 or g7 is above. See SNP in brackets. Features of MRSA patients: 11 of 11 are homozygous for the G allele. Controls: 1 of 3 is homozygous for the A allele; 2 are heterozygous.

[0209] The “h8” SNP.

[0210] SNP/rs978291 or “h8” is within the Col 19A1 Gene.

[0211] Individuals are usually homozygous for this allele but both homozygous and nonhomozygous individuals have a greater risk of developing MRSA and or SSI if they have a T or thymine in this SNP in this position when compared to those who are normal. “Normals” or “controls” are those not at greater risk of developing MRSA or SSI, and they have a C or cytosine in this SNP position. See MRSA sequence and control reference sequence below for the SNP/rs978291 where both MRSA susceptible and control are described.

[0212] The precise location of the SNP/rs978291 within the Col 19A1 gene is indicated below and in the sequence listing. The SNP can be identified and located using the sequences or fragments of the sequences provided below or using the information in the sequence listing which identifies and places the SNP within the full gene sequence. Related sequences or probes could be made by one skilled in the art. The complete sequence of the Col 19A1 gene is in the sequence listing (SEQ ID NO 14) with the polymorphism indicated at position 152225 and the nucleotide is defined as being either T or C. See the sequence below for the indicator SNP, or critical SNP (SNP/rs978291) located within the Col 19A1 gene. SEQ ID NO 21 shows a T or thymine for those with an increased risk of MRSA or SSI. If the reference allele is labeled “MRSA” then a person who has the bracketed nucleotide in this position is at greater than normal risk of developing MRSA or SSI. SEQ ID NO 22 (control) shows a C or cytosine (bracketed) for those not at increased risk of MRSA or SSI.

[0213] SNP/rs978291 or “h8”

| Reference | Affymetrix |
|---|---|
| allele | and GRCh38.p2 Primary Assembly Sequence |
| MRSA | AACTGCAGCT GAGTCCTACT GGAAA[T]CCTC |
| | TGAGGAAGCC TGTAGAATGT G (SEQ ID NO 21) |
| Controls | AACTGCAGCT GAGTCCTACT GGAAA[C]CCTC |
| | TGAGGAAGCC TGTAGAATGT G (SEQ ID NO 22) |

[0214] Sequence of SNP/rs978291 or h8 is above. See SNP in brackets. Features of MRSA patients: 11 of 11 are homozygous for the T allele. Controls: 1 of 3 is homozygous for the C allele; 2 are heterozygous.

[0215] The “i9” SNP.

[0216] SNP/rs978290 or “i9” is within the Col 19A1 Gene.

[0217] Individuals are usually homozygous for this allele but both homozygous and nonhomozygous individuals have a greater risk of developing MRSA and or SSI if they have an A or adenine in this SNP in this position when compared to those who are normal. “Normals” or “controls” are those not at greater risk of developing MRSA or SSI, and they have a G or guanine in this SNP position. See MRSA sequence and control reference sequence below for the SNP/rs978290 where both MRSA susceptible and control are described.

[0218] The precise location of the SNP/rs978290 within the Col 19A1 gene is indicated below and in the sequence listing. The SNP can be identified and located using the sequences or fragments of the sequences provided below or using the information in the sequence listing which identifies and places the SNP within the full gene sequence. Related sequences or probes could be made by one skilled in the art. The complete sequence of the Col 19A1 gene is in the sequence listing (SEQ ID NO 14) with the polymorphism indicated at position 151755 and the nucleotide is defined as being either A or G. See the sequence below for the indicator SNP, or critical SNP (SNP/rs978290) located within the Col 19A1 gene. SEQ ID NO 23 shows an A or adenine for those with an increased risk of MRSA or SSI. If the reference allele is labeled “MRSA” then a person who has the bracketed nucleotide in this position is at greater than normal risk of developing MRSA or SSI. SEQ ID NO 24 (control) shows a G or guanine (bracketed) for those not at increased risk of MRSA or SSI.

[0219] SNP/rs978290 or “19”

| Reference | |
|---|---|
| allele | GRCh38.p2 Primary Assembly Sequence |
| MRSA | TTCTTGGTAG AAAGCAAGGT TTTTG[A]GAGT |
| | AAAAGCAGAA GTCATAATAC C (SEQ ID NO 23) |
| Controls | TTCTTGGTAG AAAGCAAGGT TTTTG[G] GAGT |
| | AAAAGCAGAA GTCATAATAC C (SEQ ID NO 24) |

[0220] Sequence of SNP/rs978290 or i9. See SNP in brackets. Features of Affymetrix annotated SNP as the reverse complement compared to the GRCh38.p2 Primary Assembly; therefore, Affymetrix allele C is GRCh38.p2 Primary Assembly allele, G and Affymetrix allele T is GRCh38.p2 Primary Assembly allele A. MRSA patients: 11 of 11 are homozygous for the A allele. Controls: 1 of 3 is homozygous for the G allele; 2 are heterozygous.

[0221] The “j10” SNP.

[0222] SNP/rs1131891 or “j10” is within the IGSF8 Gene.

[0223] This gene, IGFS8, codes for immunoglobulin superfamily protein 8, which is linked to cell motility, polarity, cell adhesion, migration of leukocytes between cells, and infection with parasites. Individuals are usually homozygous for this allele but both homozygous and nonhomozygous individuals have a greater risk of developing MRSA and or SSI if they have a G or guanine SNP in this position when compared to those who are normal. “Normals” or “controls” are those not at greater risk of developing MRSA or SSI, and they have an A or adenine in this SNP position. See MRSA sequence and control reference sequence below for the SNP/rs1131891 where both MRSA susceptible and control are described.

[0224] The precise location of the SNP/rs1131891 or j10, located within the IGSF8 gene, is indicated below and in the sequence listing. The complete sequence of the IGSF8 gene is in the sequence listing (SEQ ID NO 25) with the polymorphism indicated at position 6692 and the nucleotide is defined as being either G or A. The SNP can be identified and located using the sequences or fragments of the sequences provided below or in the sequence listing. The location of the SNP within the full and partial gene sequences is indicated. Related sequences or probes could be made by one skilled in the art. See the sequence below for the indicator SNP/rs1131891, or critical SNP “j10” located within the IGSF8. SEQ ID NO 26 shows a G or guanine for those with an increased risk of MRSA or SSI. If the reference allele is labeled “MRSA” then a person who has the bracketed nucleotide in this position is at greater than normal risk of developing MRSA or SSI. SEQ ID NO 27 (control) shows an A or adenine (bracketed) for those not at increased risk of MRSA or SSI.

[0225] SNP/rs1131891 or “j10”

| Reference | |
|---|---|
| allele | Sequence |
| MRSA | ACCCTTTTCA GGTCTTGCAG GTGTC[G]ACT |
| | GTCTTCCGGC CCAGCTCCAA GC (SEQ ID NO 26) |
| Controls | ACCCTTTTCA GGTCTTGCAG GTGTC[A]ACT |
| | GTCTTCCGGC CCAGCTCCAA GC (SEQ ID NO 27) |

[0226] The “k11” SNP.

[0227] SNP/rs127711411 or “k11” is within the ADARB2 Gene.

[0228] This gene, ADARB2, known as, adenosine deaminase RNA-specific B2, is linked to neurologic diseases but, oddly, has no known link to the skin or the immune system. Individuals are usually homozygous for this allele but both homozygous and nonhomozygous individuals have a greater risk of developing MRSA and or SSI if they have an A or adenine SNP in this position when compared to those who are normal. “Normals” or “controls” are those not at greater risk of developing MRSA or SSI, and they have a G or guanine in this SNP position. See MRSA sequence and control reference sequence below for the SNP/rs127711411 where both MRSA susceptible and control are described.

[0229] The precise location of the SNP/rs127711411 within the ADARB2 gene is indicated below and in the sequence listing. The SNP can be identified and located using the sequences or fragments of the sequences provided below or using the information in the sequence listing which identifies and places the SNP within the full gene sequence. Related sequences or probes could be made by one skilled in the art. The complete sequence of the ADARB2 gene is in the sequence listing (SEQ ID NO 28) with the polymorphism indicated at position 223202 and the nucleotide is defined as being either A or G. See the sequence below for the indicator SNP/rs127711411, or critical SNP “k11”, located within the ADARB2 gene. SEQ ID NO 29 shows an A or adenine for those with an increased risk of MRSA or SSI. If the reference allele is labeled “MRSA” then a person who has the bracketed nucleotide in this position is at greater than normal risk of developing MRSA or SSI. SEQ ID NO 30 (control) shows a G or guanine (bracketed) for those not at increased risk of MRSA or SSI.

[0230] SNP/rs127711411 or “k11”

| Reference | |
|---|---|
| allele | Sequence |
| MRSA | ACTAGATGCC CTGAAAATCA [A] TCTGCAGCCC |
| | ACTCCAGCCT (SEQ ID NO 29) |
| Controls | ACTAGATGCC CTGAAAATCA [G] TCTGCAGCCC |
| | ACTCCAGCCT (SEQ ID NO 30) |

[0231] The “l12” SNP.

[0232] SNP/rs4773794 or “l12” is within the DCT Gene.

[0233] This gene, DCT, known as, dopachrome tautomerase, is found in skin cells and is melanogenic. The DCT-phenotype is associated with enhanced neurotization in benign nevi and with ulceration in thin malignant melanomas. DCT is a mediator of a melanoma stress-resistant pathway, and an antiapoptotic molecule. Individuals are usually homozygous for this allele but both homozygous and nonhomozygous individuals have a greater risk of developing MRSA and/or SSI if they have a C or cytosine in this SNP position when compared to those who are normal. “Normals” or “controls” are those not at greater risk of developing MRSA or SSI, and they have a T or thymine in this SNP position. See MRSA sequence and control reference sequence below for the SNP/rs4773794 where both MRSA susceptible and control are described.

[0234] The precise location of the SNP/rs4773794 or l12 within the DCT gene is indicated below and in the sequence listing. The SNP can be identified and located using the sequences or fragments of the sequences provided below or using the information in the sequence listing which identifies and places the SNP within the full gene sequence. Related sequences or probes could be made by one skilled in the art. The complete sequence of the DCT gene is in the sequence listing (SEQ ID NO 31) with the polymorphism indicated at position 81032 and the nucleotide is defined as being either C or T. See the sequence below for the indicator SNP/rs4773794, or critical SNP “l12”, located within the DCT sequence. SEQ ID NO 32 shows a C or cytosine for those with an increased risk of MRSA or SSI. If the reference allele is labeled “MRSA” then a person who has the bracketed nucleotide in this position is at greater than normal risk of developing MRSA or SSI. SEQ ID NO 33 (control) shows a T or thymine (bracketed) for those not at increased risk of MRSA or SSI.

[0235] SNP/rs4773794 or “l12”

| Reference | |
|---|---|
| allele | Sequence |
| MRSA | CTGGGAATGT GTCTAGGAAA C[C]CTCTAGTG |
| | CTTAGTCCAC TTG (SEQ ID NO 32) |
| Controls | CTGGGAATGT GTCTAGGAAA C[T]CTCTAGTG |
| | CTTAGTCCAC TTG (SEQ ID NO 33) |

[0236] Sequence of SNP/rs4773794 or l12, above.

[0237] The “m13” SNP.

[0238] SNP/rs4619820 or “m13” is Near but Outside of and Between Two Genes.

[0239] The SNP/rs4619820 SNP is located between the gene that codes for CCR2 chemokine (C-C motif) receptor-2, also called CCR2 or DDR2 (provided here in the sequence listing as SEQ ID NO 34) and lactoferrin, also known as lactotransferrin (LTF). LTF, lactoferrin or lactotransferrin, stimulates the proliferation and migration of fibroblasts and keratinocytes and enhances the synthesis of extracellular matrix components, such as collagen and hyaluronan. The protein demonstrates a broad spectrum of properties, including regulation of iron homeostasis, host defense against a broad range of microbial infections, anti-inflammatory activity, regulation of cellular growth and differentiation and protection against cancer development and metastasis. Antimicrobial, antiviral, antifungal and antiparasitic activity has been found for this protein and its peptides. CCR2 (sometimes also called DDR2) is a gene that encodes two isoforms of a receptor for monocyte chemoattractant protein-1, a chemokine which specifically mediates monocyte chemotaxis. Monocyte chemoattractant protein-1 is involved in monocyte infiltration in inflammatory diseases such as rheumatoid arthritis as well as in the inflammatory response against tumors. The receptors encoded by this gene mediate agonist-dependent calcium mobilization and inhibition of adenylyl cyclase. This gene is located in the chemokine receptor gene cluster region. Two alternatively spliced transcript variants are expressed by the gene.

[0240] Individuals are usually homozygous for this allele but both homozygous and nonhomozygous individuals have a greater risk of developing MRSA and or SSI if they have a G or guanine in this position when compared to those who are normal. “Normals” or “controls” are those not at greater risk of developing MRSA or SSI, and they have A or adenine in this SNP position. See MRSA sequence and control reference sequence below for the SNP/rs4619820 where both MRSA susceptible and control are described. SEQ ID NO 35 is the gene sequence which starts at position 46,360,941 (at the end of the CCR2 gene) and ends at position 46,425,932; the SNP/rs4619820 is contained between these positions, but before the LTF gene, The LTF gene is on Chr3: 46,436,005-46,465,142. The polymorphism is indicated at position 64492 and the nucleotide is defined as being either G or A. See the sequence below for the indicator SNP/rs4619820, or critical SNP “m13” position, located within the sequence. SEQ ID NO 36 shows a G or guanine for those with an increased risk of MRSA or SSI. If the reference allele is labeled “MRSA” then a person who has the bracketed nucleotide in this position is at greater than normal risk of developing MRSA or SSI. SEQ ID NO 37 (control) shows a A or adenine (bracketed) for those not at increased risk of MRSA or SSI.

[0241] SNP/rs4619820 or “m13”

Reference

| allele | Sequence |
|---|---|
| MRSA | GATTACAGGC ATGAGACACC GCATG[G]CCTG |
| | CACCTATAGT CCCAGCTATC A (SEQ ID NO 36) |
| Controls | GATTACAGGC ATGAGACACC GCATG[A]CCTG |
| | CACCTATAGT CCCAGCTATC A (SEQ ID NO 37) |

[0242] Sequence for SNP/rs4619820 or m13, is located between two genes. Features: The location of this SNP is described as located at the following number of base pairs between the two genes. This SNP is 15818 bp at 5′ side of DDR2 or C-C chemokine receptor-like 2 isoform 1 and 10263 bp at 3′ side: lactotransferrin isoform 1 precursor or LTF.

[0243] SEQ ID NOs 36 and 37 span 25 nucleotide sequences before and after the SNP.

[0244] Combinations of SNPs, Critical SNP Locations and Critical SNP Nucleotides

[0245] The SNPs presented above are given a letter/number abbreviation for use and reference above and in the list below, a1-m13, are 13 useful SNPs discussed and claimed in unique combinations and procedures herein.

a1) is SNP/rs2249861 within the FAM 129B gene;
b2) is SNP/rs2352969 within the RBM6 gene;
c3) is SNP/rs12758910 within the KANK 4 gene;
d4) is SNP/rs2642572 outside of and between two genes, C10orf35 isoform X1 and Col 13A1;
e5) is SNP/rs3793038 within the Col 19A1 gene;
f6) is SNP/rs3805987 within the Col 19A1 gene;
g7) is SNP/rs9454944 within the Col 19A1 gene;
h8) is SNP/rs978291 within the Col 19A1 gene;
i9) is SNP/rs978290 within the Col 19A1 gene;
j10) is SNP/rs1131891 within the IGSF8 gene;
k11) is SNP/rs127711411 within the ADARB2 gene;
l12) is SNP/rs4773794 is within the DCT gene; and
m13) is SNP/rs4619820 outside of and between two genes, CCR2 and LTF.

[0246] In one embodiment of the invention each SNP is considered, evaluated and used individually and separately. In another embodiment of the invention two SNPs are considered, evaluated and used in combinations of two or more. Using the letter number codes above the following combinations are enumerated:

[0247] Several different embodiments, examples and applications of the invention are provided below. In the pages immediately below we provide many examples of actual combinations of SNPs using the abbreviations above, e.g. SNP/rs2249861 within the FAM 129B gene is labeled “a1” and SNP/rs2352969 within the RBM6 gene labeled “b2”. Here we also describe every single combination for 2 SNPs and 3 SNPs to clearly show the progression and to show how to determine every combination for 2, 3, 4, 5, 6, 7, 8, 9, 10, 11, 12 and 13 combinations. There is only one way to make all thirteen combinations of course and that is to include all 13 SNPs. We also note that because of the heterozygous nature of many of the genes, many of the SNPs may appear as duplicates in any diagnostics or treatments.

[0248] The general equation used to determine the number of combination is C(n,r)=n!/(r!(n−r)!); where n is the number of possible combinations, here 13 and r is the number of SNPs in the combination, i.e., the number of elements. It is otherwise known as the “n choose r” or “n choose k” equation. Here there are 13 different SNPs that could be used either alone or in different combinations using combinations of 2, 3, 4, 5, 6, 7, 8, 9, 10, 11, 12 and even all 13. Because the number of variables or SNPs is 13 we can say n=13 in the equation. The number of combinations “C” goes from 2-13 and this does not include individual single SNPs which could also be used to identify a person at greater than normal risk of developing a MRSA infection if the person is exposed to MRSA.

[0249] Using this formula we calculate the number of possible combinations for 1-13 elements or SNPs as follows:

[0250] 1=13 (as single SNPs)

[0251] 2=78

[0252] 3=286

[0253] 4=715

[0254] 5=1287

[0255] 6=1716

[0256] 7=1716

[0257] 8=1287

[0258] 9=715

[0259] 10=286

[0260] 11=78

[0261] 12=13

[0262] 13=1 (one of each possible SNP—the same as single SNPs)

[0263] Another way to describe these combinations is to use “Markush” type of language commonly used to make and claim generic descriptions of organic compounds where individual parts or elements in the molecules may vary. Here there can be variations in which SNPs are used, including each SNP individually, all 13 SNPs and any and all of the possible combinations of those 13 SNPs. The level of confidence in any diagnostic test developed using these SNPs will likely increase when using more SNPs. We advise the best results would result from using 2 or more SNPS. In order to simplify the discussion we can write the “SNP Markush” as follows:

[0264] Combinations of 2 are I(a1, b2, c3, d4, e5, f6, g7, h8, i9, j10, k11, l12, or m13)+I(a1, b2, c3, d4, e5, f6, g7, h8, i9, j10, k11, l12, or m13), where I is a roman numeral that indicates the number of SNP combinations, with duplicates removed. Instead of listing a1, b2, c3, d4, e5, f6, g7, h8, i9, j10, k11, l12, or m13 we could write (a1−m13). So the above equation becomes I(a1−m13)+I(a1−m13) less duplicates=combinations of 2 or 78 possible combinations. We could further use the roman numeral to indicate the number of combinations in which case the above equation becomes “II(a1−m13) less duplicates”=the number of 2 SNP combinations=C(n,r)=n!/(r!(n−r)!); where n is the number of possible combinations, here 2 SNPs would allow for 78 combinations.

[0265] In a similar manner we write three (3) SNP combinations either as I(a1−m13)+I(a1−m13)+I(a1−m13) less duplicates as or “III(a1−m3) less duplicates and that would allow for 286 different combinations.”

[0266] Using the more abbreviated expression, four (4) SNP combinations are “IV(a1−m13) less duplicates.” 5-13 combinations would be: V(a1−m13) less duplicates or 1287 combinations, VI(a1−m13) less duplicates or 1716 combination, VII(a1−m3) less duplicates or 1716 combination, VIII(a1−m3) less duplicates or 1287 combinations, IX(a1−m13) less duplicates or 715 combinations, X(a1−m13) less duplicates or 286 combinations, XI(a1−m13) less duplicates or 78 combinations, X12(a1−m13) less duplicates or 13 combinations.

[0267] In the two sections below we have written out and expanded the Markush formulations given above to show each individual combination. This exercise is a simple one that begins with the lowest alphabet/number combination for each number of combinations desired and then replaces one alpha/number at a time until all are shown. Thus two (2) combinations begin with a1+b2, three (3) combinations begin with a1+b2+c3, four (4) combinations begin with a1+b2+c3+d4 etc. All of the possibilities for two (2) combinations and three (3) combinations are provided below. With this guidance, and the formula provided one skilled in the art should have the written description and enablement needed to know and understand each and every combination given the thirteen (13) SNPs.

[0268] Two (2) combinations are as follows. All combination of two SNPS are enumerated and described in abbreviated form as follows:

[0269] a1+b2, a1+c3, a1+d4, a1+e5, a1+f6, a1+g7, a1+h8, a1+i9, a1+j10, a1+k11; a1+l12; a1+m13;

b2+c3, b2+d4, b2+e5, b2+f6, b2+g7, b2+h8, b2+i9, b2+j10, b2+k11, b2+l12, b2+m13;
c3+d4, c3+e5, c3+f6, c3+g7, c3+h8, c3+i9, c3+j10, c3+k11, c3+l12, c3+m13;
d4+e5, d4+f6, d4+g7, d4+h8, d4+i9; d4+j10; d4+k11, d4+l12, d4+m13;
e5+f6, e5+g7, e5+h8, e5+i9, e5+j10; e5+k11; e5+l12, e5+m13;
f6+g7, f6+h8, f6+i9; f6+j10; f6+k11, f6+l12, f6+m13;
g7+h8, g7+i9, g7+j10, g7+k11, g7+l12, g7+m13;
h8+i9, h8+j10, h8+k11, h8+l12, h8+m13;
i9+j10, i9+k11, i9+l12, 19+m13;
j10+k11, j10+l12, j10+m13;
k11+l12, k11+m13.

[0270] Three (3) combinations are as follows. All combination of three SNPS are enumerated and described in abbreviated form as follows:

[0271] a1+b2+c3, a1+b2+d4, a1+b2+e5, a1+b2+f6, a1+b2+g7, a1+b2+h8, a1+b2+i9, a1+b2+j10, a1+b2+k11, a1+b2+l12, a1+b2+m13;

a1+c3+d4, a1+c3+e5, a1+c3+f6, a1+c3+g7, a1+c3+h8, a1+c3+i9, a1+c3+j10, a1+c3+k11, a1+c3+l12, a1+c3+m13;
a1+d4+e5, a1+d4+f6, a1+d4+g7, a1+d4+h8, a1+d4+i9, a1+d4+j10, a1+d4+k11, a1+d4+l12, a1+d4+m13;
a1+e5+f6, a1+e5+g7, a1+e5+h8, a1+e5+i9, a1+e5+j10, a1+e5+k11, a1+e5+l12, a1+e5+m13;
a1+f6+g7, a1+f6+h8, a1+f6+i9, a1+f6+j10, a1+f6+k11, a1+f6+l12, a1+f6+m13;
a1+g7+h8, a1+g7+i9, a1+g7+j10, a1+g7+k11, a1+g7+l12, a1+g7+m13;
a1+h8+i9, a1+h8+j10, a1+h8+k11, a1+h8+l12, a1+h8+m13;
a1+i9+j10, a1+i9+k11, a1+i9+l12, a1+i9+m13;
a1+j10+k11, a1+j10+l12, a1+j10+m13;
a1+k11+l12, a1+k11+m13;
a1+l12+m13,

[0272] b2+c3+d4, b2+c3+e5, b2+c3+f6, b2+c3+g7, b2+c3+h8, b2+c3+i9, b2+c3+j10, b2+c3+k11, b2+c3+l12, b2+c3+m13;

b2+d4+e5, b2+d4+f6, b2+d4+g7, b2+d4+h8, b2+d4+i9, b2+d4+j10, b2+d4+k11, b2+d4+l12, b2+d4+m13;
b2+e5+f6, b2+e5+g7, b2+e5+h8, b2+e5+i9, b2+e5+j10, b2+e5+k11, b2+e5+l12, b2+e5+m13;
b2+f6+g7, b2+f6+h8, b2+f6+i9, b2+f6+j10, b2+f6+k11, b2+f6+l12, b2+f6+m13;
b2+g7+h8, b2+g7+i9, b2+g7+j10, b2+g7+k11, b2+g7+l12, b2+g7+m13;
b2+h8+i9, b2+h8+j10, b2+h8+k11, b2+h8+l12, b2+h8+m13;
b2+i9+j10, b2+i9+k11, b2+i9+l12, b2+i9+m13;
b2+j10+k11, b2+j10+l12, b2+j10+m13;
b2+k11+l12, b2+k11+m13;
b2+l12+m13;

[0273] c3+d4+e5, c3+d4+f6, c3+d4+g7, c3+d4+h8, c3+d4+i9, c3+d4+j10, c3+d4+k11, c3+d4+l12, c3+d4+m13;

c3+e5+f6, c3+e5+g7, c3+e5+h8, c3+e5+i9, c3+e5+j10, c3+e5+k11, c3+e5+l12, c3+e5+m13;
c3+f6+g7, c3+f6+h8, c3+f6+i9, c3+f6+j10, c3+f6+k11, c3+f6+l12, c3+f6+m13;
c3+g7+h8, c3+g7+i9, c3+g7+j10, c3+g7+k11, c3+g7+l12, c3+g7+m13;
c3+h8+i9, c3+h8+j10, c3+h8+k11, c3+h8+l12, c3+h8+m13;
c3+i9+j10, c3+i9+k11, c3+i9+l12, c3+i9+m13;
c3+j10+k11, c3+j10+l12, c3+j10+m13;
c3+k11+l12, c3+k12+m13;
c3+k12+m13;

[0274] d4+e5+f6, d4+e5+g7, d4+e5+h8, d4+e5+i9, d4+e5+j10, d4+e5+k11, d4+e5+l12, d4+e5+m13;

d4+f6+g7, d4+f6+h8, d4+f6+i9, d4+f6+j10, d4+f6+k11, d4+f6+l12, d4+f6+m13;
d4+g7+h8, d4+h8+i9, d4+h8+j10, d4+h8+k11, d4+h8+l12, d4+h8+m13;
d4+h8+i9, d4+h8+j10, d4+h8+k11, d4+h8+l12, d4+h8+m13;
d4+i9+j10, d4+i9+k11, d4+i9+l12, d4+i9+m13;
d4+j10+k11, d4+j10+l12, d4+j10+m13;
d4+k11+l12, d4+k11+m13;
d4+l12+m13;

[0275] e5+f6+g7, e5+f6+h8, e5+f6+i9, e5+f6+j10, e5+f6+k11, e5+f6+l12, e5+f6+m13;

e5+g7+h8, e5+g7+i9, e5+g7+j10, e5+g7+k11, e5+g7+l12, e5+g7+m13;
e5+h8+i9, e5+h8+j10, e5+h8+k11, e5+h8+l12, e5+h8+m13;
e5+i9+j10, e5+i9+k11, e5+i9+l12, e5+ki9+m13;
e5+j10+k11, e5+j10+l12, e5+j10+m13;
e5+k11+l12, e5+k11+m13;
e5+l12+m13;

[0276] f6+g7+h8, f6+g7+i9, f6+g7+j10, f6+g7+k11, f6+g7+l12, f6+g7+m13;

f6+h8+i9, f6+h8+j10, f6+h8+k11, f6+h8+l12, f6+h8+m13;
f6+i9+j10, f6+i9+k11, f6+i9+l12, f6+g7+m13;
f6+j10+k11, f6+j10+l12, f6+j10+m13;
f6+k11+l12, f6+k11+m13;
f6+l12++m13;

[0277] g7+h8+i9, g7+h8+j10, g7+h8+k11, g7+h8+l12, g7+h8+m13;

g7+i9+j10, g7+i9+k11, g7+i9+l12, g7+i9+m13;
g7+j10+k11, g7+j10+l12, g7+j10+m13;
g7+k11+l12, g7+k11+m13;
g7+l12+m13;

[0278] h8+i9+j10, h8+i9+k11, h8+i9+l12, h8+i9+m13;

h8+j10+k11, h8+j10+l12, h8+j10+m13;
h8+k11+l12, h8+k11+m13;
h8+l12+m13;

[0279] i9+j10+k11, i9+j10+l12, i9+j10+m13;

i9+k11+l12, i9+k11+m13;
i9+l12+m13;

[0280] j10+k11+l12, j10+k11+m13;

j10+l12+m13;

[0281] k11+l12+m13.

[0282] All single SNPs and combinations of 2, 3, 4, 5, 6, 7, 8, 9, 10, 11, 12 and 13 SNPs combined in any number and any combination together are described and claimed. Thus, a1 can be used in any combination with any of the following in combinations of 2-12 including: b2; c3; d4; e5; f6; g7; h8; i9; j10; k11; l12; and m13. Similarly, b2 can be used in any combination with any of the following in combinations of 2-12 including: a1; c3; d4; e5; f6; g7; h8; i9; j10; k11; l12; and m13. Similarly, “c3” can be used in any combination with any of the following in combinations of 2-12 comprising a1; b2; d4; e5; f6; g7; h8; i9; j10; k11; l12; and m13. Similarly, “d4” can be used in any combination with any of the following in combinations of 2-12 including a1; b2; c3; e5; f6; g7; h8; i9; j10; k11; l12; and m13. Similarly, “e5” can be used in any combination with any of the following in combinations of 2-12 including a1; b2; c3; d4; f6; g7; h8; i9; j10; k11; l12; and m13. Similarly, “f6” can be used in any combination with any of the following in combinations of 2-12 including a1; b2; c3; d4; e5; g7; h8; i9; j10; k11; l12; and m13. Similarly, “g7” can be used in any combination with any of the following in combinations of 2-12 including a1; b2; c3; d4; e5; f6; h8; i9; j10; k11; l12; and m13. Similarly “h8” can be used in any combination with any of the following in combinations of 2-12 including a1; b2; c3; d4; e5; f6; g7; i9; j10; k11; l12; and m13. Similarly, “i9” can be used in any combination with any of the following in combinations of 2-12 including a1; b2; c3; d4; e5; f6; g7; h8; j10; k11; l12; and m13. Similarly, “j10” can be used in any combination with any of the following in combinations of 2-12 including a1; b2; c3; d4; e5; f6; g7; h8; i9; k11; l12; and m13. Similarly, “k11” can be used in any combination with any of the following in combinations of 2-12 including a1; b2; c3; d4; e5; f6; g7; h8; i9; j10; 112; and m13. Similarly, “l12” can be used in any combination with any of the following in combinations of 2-12 including a1; b2; c3; d4; e5; f6; g7; h8; i9; j10; k11; and m13. Similarly, “m13” can be used in any combination with any of the following in combinations of 2-12 including a1; b2; c3; d4; e5; f6; g7; h8; i9; j10; k11; and l12.

### Embodiments of the Invention

[0283] To practice the methods described herein one begins by obtaining a biological sample from the subject, wherein said biological sample includes at least one oligonucleotide occupying a locus corresponding to any of the SNPs “a1” to “m13” the descriptions and positions are described above; detecting the identity of at least one oligonucleotide occupying a locus corresponding to any of the SNPs a1 to m13, or critical SNPs; determining whether at least one oligonucleotide occupying the locus corresponding to any of the SNPs a1 to m13 is a critical SNP, either control critical SNP or MRSA critical SNP, or indicator SNPs and predicting and assessing the level of risk of the subject developing a MRSA infection depending on whether and how many SNPs the individual has and whether or not they indicate a high risk and how many indicate normal or control risk. If the SNP has the nucleotide type of “normal” or “control” then that indicates that the subject has a normal or lower risk of developing a MRSA infection if exposed to MRSA bacteria than does a MRSA risk or high risk individual when exposed to MRSA bacteria.

[0284] We describe embodiments wherein the detecting step further comprises hybridizing at least one oligonucleotide (in the biological sample) occupying a locus corresponding to the SNPs a1 to m13, to an oligonucleotide probe comprising a sequence that is complementary or identical to the sequences of the various sequences in the sequence listing, or to related sequences that would be known to one skilled in the art, under stringency conditions (e.g., high stringency) that can detect the presence of different alleles for the positions of the SNPs a1 to m13.

[0285] We describe embodiments wherein the detecting step further comprises evaluating the hybridization of at least one oligonucleotide from the biological sample which corresponds to one of the positions of the SNPs which are described herein. The detecting step further may comprise sequencing the oligonucleotide from the biological sample.

[0286] In other embodiments the detecting step further comprises amplifying the oligonucleotide from the biological sample. In some embodiments the amplifying step uses at least one oligonucleotide primer and at least one oligonucleotide from the biological sample occupying a locus corresponding to the nucleotide bases at positions a1 to m13 of the SNPs described here. The oligonucleotide primer may be comprised of DNA.

[0287] We describe methods to detect, identify and treat MRSA in all it various stages and forms including the treatments that may be made after it is determined whether the patient has a high or normal risk of developing a MRSA, CA-MRSA infection or HA-MRSA following exposure. One it is determined that the patient has a high risk of developing a MRSA infection, the patient is given anti MRSA antibiotics, and may also be given decolonization, aggressive antibiotic, or recolonization treatments. Once it is determined that the patient has a high risk of developing a MRSA infection, the patient may be given more than one course of anti MRSA antibiotics, decolonization treatments and may be put on high infection alert for any future surgeries. The patient may also be put in isolation or reduced contact zones in order to further decrease the patient's potential exposure to MRSA.

[0288] In other embodiments after it is determined that the patient has a normal risk of developing a MRSA infection, the patient is not given any antibiotics and is only treated with incision and drainage, sometimes such a normal risk patient is treated with incision and drainage and given a routine antibiotic treatment that does not include anti MRSA antibiotics.

[0289] This application also describes and claims one or more primers or probes to be used to amplify or detect at least one or more nucleotides from a biological sample, wherein one or more nucleotides occupy a locus corresponding to positions indicated in reference to SNPS a1-m13. There may be one or more primers that span the nucleotide positions about the various SNP positions. The primers or probes may be from about 5 to 1500 bases long. Optimally the primers may be from about 5 to about 50 nucleotides in length, or from about 8 or 10 to about 44 nucleotides in length. Many other probe lengths are described herein. Described are probes wherein said one or more probes span the nucleotide positions about the position of SNPs a1-m13. Described are probes having a different disruption energy for one allele as compared to another allele; two probes, wherein the first probe is a sensor probe and the second probe is an anchor probe; and a SNP-specific probe, in addition to methods to make and use these and other primers and probes.

[0290] It is important to appreciate that the probes described here are not merely gene fragments, instead they are modified artificial constructs with artificial chemically synthesized indicator regions, or critical SNP locations or locus that are often made radioactive or fluorescent. The source of the genetic material is not relevant to the effectiveness of the probe. The probes are inspired by genetic fragments of genetic material where the fragments identified here were created by artificial chemical reactions but the probes do not exist in nature or in humans.

[0291] In some embodiments one or more primers or probes are placed into a kit designed for use by a caregiver who seeks to predict or assess the level of risk of a subject developing a MRSA infection. The kit provides a collection of needed materials that can be easily transported. The kit and its instructions comprise obtaining a biological sample from the subject, wherein said biological sample includes at least one oligonucleotide occupying a locus corresponding to the position of SNPs a1-m13; detecting the identity of said at least one oligonucleotide occupying the locus corresponding to the position of SNPs a1-m13; determining whether said at least one oligonucleotide occupying the locus corresponding to the position of SNPs a1-m13 is a control or a high MRSA risk nucleotide and predicting and assessing the level of risk of the subject developing a MRSA infection.

[0292] We disclose methods to monitor and prepare a patient for hospitalization and or surgery, wherein said monitoring and preparing comprise obtaining a biological sample from the patient, wherein said biological sample includes at least one oligonucleotide occupying a locus corresponding to the position of SNPs a1-m13; detecting the identity of the at least one oligonucleotide occupying the locus corresponding to the position of SNPs a1-m13; determining whether said at least one oligonucleotide occupying the locus corresponding to the position of SNPs a1-m13 is a control or a high MRSA risk SNP; predicting and assessing the level of risk of the patient developing a MRSA infection, wherein a “high MRSA risk” SNP indicates that the patient has a high risk of developing a MRSA or CA-MRSA infection and a “Control” SNP occupying the locus corresponding to the position of SNPs a1-m13 indicates that the patient has a normal or average risk of developing a MRSA or CA-MRSA infection; and wherein when the predication and assessment indicates that the patient is at high risk for a MRSA infection, taking appropriate steps and care as one normally skilled in the art would take when operating on a person at high risk of developing a MRSA infection.

[0293] One aspect of the inventive method of determining whether a subject is at increased risk of developing MRSA and/or CA-MRSA, or a recurrence of MRSA or CA-MRSA, may include: obtaining a biological sample from the subject, wherein said biological sample contains at least one oligonucleotide comprising a loci corresponding to the position of SNPs a1-m13; detecting the identity of one, all, or any combination of each nucleotide that occurs at the position of the SNPs a1-m13 in said oligonucleotide; and comparing the identity of such nucleotide that occurs at a loci corresponding to SNPs a1-m13 in at least one SNP position to determine whether it or they are a “control” or a high MRSA risk oligonucleotide, wherein the subject is at increased risk of developing MRSA and/or CA-MRSA, or a recurrence of MRSA or CA-MRSA if one or more nucleotides at the loci corresponding to the position of SNPs a1-m13 are the same as the identity of the MRSA high risk or SSI nucleotide at the position of SNPs a1-m13.

[0294] Another aspect of the inventive method of determining whether a subject is at increased risk of developing MRSA and/or CA-MRSA, or a recurrence of MRSA or CA-MRSA, is the following method: obtaining a biological sample from the subject, wherein said biological sample contains at least one oligonucleotide comprising a loci corresponding to the position of SNPs a1-m13; detecting the identity of each nucleotide that occurs at a loci corresponding to the position of SNPs a1-m13; and comparing said identity of each nucleotide to the identity of the control and high risk nucleotide at the position of the SNPs a1-m13.

[0295] In other aspects, the detecting step may further comprise hybridization of said at least one oligonucleotide comprising a loci corresponding to the position of SNPs a1-m13 to a probe comprising an oligonucleotide comprising a sequence complementary or identical to the nucleotide in the position of SNPs a1-m13, for example, a nucleotide indicating high risk of developing a MRSA infection, under stringency conditions than can detect the presence of different alleles at position 17 of SEQ ID 3 or 4. In other aspects, the detecting step may further comprise hybridization of said at least one oligonucleotide comprising a loci corresponding to the MRSA high risk position of SNPs a1-m13 to a probe comprising an oligonucleotide comprising a sequence complementary or identical to the sequences having either the “MRSA high risk of infection” position of SNPs a1-m13, or normal risk of infection position of SNPs a1-m13, under stringency conditions than can detect the presence of different alleles at the position of SNPs a1-m13. In other aspects, the detecting step further comprises evaluating the hybridization of an oligonucleotide containing a locus corresponding to the position of SNPs a1-m13, for either control or normal SNP positions as we describe in other places in the this description. The SNP position nucleotides derived from said subjects will adhere or align to a probe comprising a sequence complementary or identical to the position of SNPs a1-m13, either MRSA or normal, under stringency conditions, and the use of the probe that can determine and establish the presence of different alleles at the 13 different position of SNPs a1-m13 of said oligonucleotides.

[0296] In other aspects, the detecting step may further comprise amplifying at least one oligonucleotide from said biological sample containing a locus corresponding to the position of SNPs a1-m13, wherein said amplifying step uses at least one oligonucleotide primer. In some aspects, the oligonucleotide primer comprises DNA.

[0297] In other aspects, the determining step may further comprise using a probe to detect the presence of a locus corresponding to the control position of SNPs a1-m13 in the biological sample. In other aspects, the determining step may further comprise using a probe to detect the presence of a locus corresponding to the high MRSA risk position of SNPs a1-m13 in the biological sample.

[0298] In other aspects, the probe may be labeled with a detection signal. In other aspects, the probe may comprise an oligonucleotide having a sequence that is complementary or identical to a region flanking the locus corresponding to the position of SNPs a1-m13.

[0299] In other aspects, the method may further comprise treating or providing preventative treatment to the subject with an antibiotic effective against MRSA, when the subject is found to be at increased risk of developing MRSA, CA-MRSA or having a recurrence of MRSA or CA-MRSA, even when the subject is showing no symptoms of MRSA. In other aspects, the method may further comprise treating the subject to remove or prevent colonization by skin-surface or intranasal populations of MRSA, when the subject is found to be at increased risk of developing MRSA, CA-MRSA or having a recurrence of MRSA or CA-MRSA.

[0300] In other aspects, the method may further comprise not treating or pre-treating a subject with an antibiotic effective against MRSA, when the subject is found not to be at increased risk of developing MRSA, CA-MRSA or having a recurrence of MRSA or CA-MRSA, even when the results of a survey about increased MRSA or SSI suggest the subject is at high risk of developing MRSA or SSI. In other aspects, the method may further comprise withholding treatment of the subject to remove or prevent colonization by skin-surface or intranasal populations of MRSA, when the subject is found not to be at increased risk of developing MRSA, CA-MRSA or having a recurrence of MRSA or CA-MRSA.

[0301] Embodiments of the present invention may comprise a kit for determining whether a subject is at increased risk of developing MRSA, CA-MRSA, or a recurrence of MRSA and/or CA-MRSA, comprising at least one primer for amplification of one or more nucleotides that occur at a loci corresponding to the position of SNPs a1-m13 or a combination thereof from a biological sample from the subject.

[0302] Other embodiments of the present invention may comprise a kit for determining whether a subject is at increased risk of developing MRSA, CA-MRSA, or a recurrence of MRSA and/or CA-MRSA, comprising at least one probe for detection of one or more nucleotides that occur at a loci corresponding to the position of SNPs a1-m13 or a combination thereof from a biological sample from the subject.

[0303] Single Nucleotide Polymorphisms

[0304] Analysis of single nucleotide polymorphisms (SNPs) can be effective in discovering genomic differences (i.e., genotypes) in individuals or populations exhibiting different phenotypes, such as susceptibility or increased risk of contracting certain diseases or syndromes. With the advent of rapid sequencing, amplification and high throughput screening of oligonucleotides, analysis of SNPs can be used to probe individual and population genomes for one or more SNPs that correlate with (are “markers” for) the presence of a certain phenotype. Discovery of one or more reliably correlating markers (among other uses) allows for early diagnosis of potential susceptibility or risk for certain diseases, even where a phenotype is not yet being exhibited in a particular individual, e.g., a late-onset cancer or susceptibility to a disease organism prior to exposure. Here, we disclose a number of SNPs and their locations, either within or associated with certain genes, we disclose what those associated genes are, their full sequence and we provide the sequence of nucleotides immediately upstream and downstream in the genome of all of the SNPs, in order that presentation, identification and comparison of the location of particular SNPs in the genome can be made. We claim and describe how to use the existence of the SNPs to identify the susceptibility, or the risk an individual may face, which can be especially useful when a person is placed in situations where there is traditionally a high risk of acquiring an MRSA or SSI infection.

[0305] Often, SNP detection methods can distinguish between homozygous and heterozygous individuals. The presence of zero, zero or one, one, one or two, or two copies of a particular base substitution allele may correlate with a particular phenotype. “Dominant,” “recessive” and “intermediate dominance”/“incomplete dominance” of a particular allele at a locus can be defined as the relative contribution of each allele to the phenotype of a heterozygous individual. For example, where a heterozygous individual carrying one copy of allele A and one copy of allele A′ has the same phenotype as a homozygous AA individual, and a different phenotype from a homozygous A′A′ individual, allele A is dominant over allele A′. Where a heterozygous individual AA′ exhibits a different or intermediate phenotype between the homozygote phenotypes, allele A′ and A are said to exhibit an intermediate or incomplete dominance.

[0306] While SNPs occur at particular locations in the genome, presentation, identification and comparison of the location of particular SNPs is aided by inclusion of the sequence of nucleotides immediately upstream and downstream in the genome. SNP detection methods using oligonucleotide hybridization methods may use the same sequence as presented herein as all or part of a primer or probe sequence, and thus such sequences may serve as examples of an appropriate primer or probes for these methods. Persons of skill in the art realize that design of appropriate primers and probes, examples of which are provided below, are not necessarily limited to the sequences listed herein for purposes of presentation, and may be longer or shorter, and include more or less of the upstream and downstream flanking sequence(s), as long as they encompass the location of a SNP.

[0307] The oligonucleotide hybridization method typically uses probes of 5, 10, 20, 30, 40, 50, 60, 70, 80, 90 or 100 to 200, 300, 400, 500, 600, 700, 800, 900, 1000, 1100, 1200, 1300, 1400, or 1500 bases long (10 to 100, 20 to 900, 30 to 800, 40 to 700, 50 to 600, 20 to 500, 30 to 400, 40 to 300, 50 to 200, 40 to 100, 40 to 80, 40 to 60, 50 to 100, 50 to 80, bases) or other combinations with more or less bases which have TOM radioactive molecules, fluorescent molecules or some other labeling mechanism. Commonly used markers are ³²P (a radioactive isotope of phosphorus incorporated into the phosphodiester bond in the probe DNA) or Digoxigenin, which is a non-radioactive, antibody-based marker. DNA sequences or RNA transcripts that have moderate to high sequence similarity to the probe are then detected by visualizing the hybridized probe via autoradiography or other imaging techniques. Normally, either X-ray pictures are taken of the filter, or the filter is placed under UV light. Detection of sequences with moderate or high similarity depends on how stringent the hybridization conditions were applied—high stringency, such as high hybridization temperature and low salt in hybridization buffers, permits only hybridization between nucleic acid sequences that are highly similar, whereas low stringency, such as lower temperature and high salt, allows hybridization when the sequences are less similar. Hybridization probes used in DNA microarrays refer to DNA covalently attached to an inert surface, such as coated glass slides or gene chips, to which a mobile cDNA target is hybridized.

[0308] The probe may be synthesized using a variety of methods, including but not limited to the following: the phosphoramidite method and or it can be generated and labeled by PCR amplification or cloning (both are older methods). In order to increase the in vivo stability of the probe RNA is not used, instead RNA analogues may be used, in particular morpholino-derivatives. Molecular DNA- or RNA-based probes are now routinely used in screening gene libraries, detecting nucleotide sequences with blotting methods, and in other gene technologies, such as nucleic acid and tissue microarrays.

[0309] Allelle-specific Oligonucleotide or ASO analysis is only one of the methods used to detect genetic polymorphisms. Direct DNA sequencing can be used to initially characterize the mutation, but is too laborious for routine screening. An earlier method, Restriction Fragment Length Polymorphism (RFLP) didn't need to know the sequence change beforehand, but required that the mutation affect the cleavage site of a Restriction Enzyme. The RFLP assay was briefly adapted to the use of oligonucleotide probes, but this technique was quickly supplanted by ASO analysis of polymerase chain reaction (PCR) amplified DNA. The PCR technique itself has been adapted to detect polymorphisms, as allele-specific PCR. However, the simplicity and versatility of the combined PCR/ASO method has led to its continued use, including with non-radioactive labels, and in a “reverse dot blot” format where the ASO probes are bound to the membrane and the amplified sample DNA is used for hybridization.

[0310] Methods and materials of the invention may be used more generally to evaluate a DNA sample from a subject, genetically type the subject, and detect genetic differences between subjects. In one embodiment of the invention, a biological sample which includes DNA from a subject is evaluated to detect the genotype of the subject for a nucleotide that occurs at any of the SNPs labeled here as SNPs “1a” to “13m.” A sample of genomic DNA from a subject may be evaluated by reference to one or more controls (or normal) to determine if a SNP or group of SNPs is present. With this present invention, any method for determining genotype can be used for determining the genotype of the subject. Such methods include, but are not limited to, amplimer sequencing, DNA sequencing, fluorescence spectroscopy, fluorescence resonance energy transfer (or “FRET”)-based hybridization analysis, high throughput screening, mass spectroscopy, microsatellite analysis, nucleic acid hybridization, polymerase chain reaction (PCR), RFLP analysis and size chromatography (e.g., capillary or gel chromatography), all of which are well known to one of skill in the art. In particular, methods for determining nucleotide polymorphisms, particularly single nucleotide polymorphisms, are described in U.S. Pat. Nos. 6,514,700; 6,503,710; 6,468,742; 6,448,407; 6,410,231; 6,383,756; 6,358,679; 6,322,980; 6,316,230; and 6,287,766 and reviewed by Chen and Sullivan, Pharmacogenomics J 2003; 3(2):77-96, the disclosures of which are incorporated by reference in their entireties. Genotypic data useful in the methods of the invention and methods for the identification and selection of genes associated with CA-MRSA are based on the presence of SNPs.

[0311] Single Nucleotide Polymorphisms Associated with CA-MRSA

[0312] Genomic DNA was obtained from a population of patients with recurrent CA-MRSA as well as from healthy spouse controls, which were likely to have been exposed to the same MRSA bacteria as the recurrent CA-MRSA patients. A microarray hybridization assay for single nucleotide polymorphism (SNP) alleles that segregated between the CA-MRSA and control populations was performed that was capable of detecting the presence of 906,000 known polymorphisms as well as their copy number in each subject (i.e., that could detect, whether the subject had multiple gene copies, and whether the subject was homozygous or heterozygous for particular allele(s) at a particular locus.)

[0313] A highly segregated SNP was found in the FAM129B gene, where all CA-MRSA subjects tested had two copies (homozygous) of one allele and control subjects had two copies (homozygous) of another allele. This SNP is present at a loci corresponding to position 17460 of SEQ ID NOs 1 and 2, wherein each of SEQ ID NOs 1 and 2 identify an alternate oligonucleotide at that position. More specifically, SEQ ID NO 1 identifies an “A” (adenine) at position 17460 and SEQ ID NO 2 identifies a “C” (cytosine) at position 17460. This SNP is located in an intron of the FAM129B gene. SEQ ID NOs 3 and 4 generally correspond with positions 17444-17464 of SEQ ID NO 1, the full-length DNA sequence of the FAM129B gene.

[0314] Subjects with at least one or more copies of the allele corresponding to position 17460 of SEQ ID NO 1 are at increased risk of developing at developing MRSA and/or CA-MRSA, or a recurrence of MRSA or CA-MRSA. And subjects with at least one or more copies of the allele corresponding to position 17460 of SEQ ID NO 2 are not at increased risk of developing at developing MRSA and/or CA-MRSA, or a recurrence of MRSA or CA-MRSA.

[0315] The FAM129B gene encodes a protein that has a predicted molecular mass of 83 kDa, and contains a pleckstrin homology domain and a proline-rich region that contains six serine phosphorylation sites (Chen et al (2011) J. Biol. Chem. 286(12):10201-10209; Old et al. (2009) Mol. Cell 34: 115-131). Phosphorylation has been associated with MAP kinase signaling cascade; in melanoma cells the MAP kinase pathway was active and the FAM129B protein was localized throughout the cytoplasm. When the MAP kinase pathway was inhibited, the FAM129B protein migrated to the cell membrane and melanoma cell migration through a collagen matrix was inhibited. (Old et al., p. 125). Subsequent work found that FAM129B was cytoplasmically localized in actively growing HeLa cells, but appeared to be localized at cell-cell junctions on the plasma membrane when the HeLa cells achieved confluence, and throughout the cell membrane during telophase. (Chen et al. pp. 10203-10204.) FAM129B also inhibited apoptosis in HeLa cells treated with TNFα or CHX, compared with knockdown FAM129B HeLa cells silenced with siRNA sequences specific to FAM129B. A recent investigation of the corresponding Fam129B protein in mice showed that Fam129B is expressed in the epidermal keratinocytes in embryonic and adult mice. Fam129B-knockout mice exhibited delayed wound healing and had altered expression of several wound-repair and cell-motility related genes (Oishi et al. (published online Sep. 11, 2012), J. Biochem. doi:10.1093/jb/mvs100).

[0316] Using similar procedures as above critical SNPs “a1” to “m13” were also found, located and described as disclosed herein. While this experiment happened to use patients thought to have CA-MRSA we fully expect to see the same results with all forms of MRSA. While this experiment happened to use patients with homozygous alleles we fully expect the same results would apply to those with heterozygous alleles.

[0317] Methods of Diagnosing Increased Risk of Developing MRSA

[0318] Aspects of the present invention comprise methods of determining whether a subject is at increased risk of developing MRSA, HA-MRSA, CA-MRSA, or SSI, or a recurrence of any form of MRSA or SSI comprising: obtaining a biological sample from a subject; obtaining at least one oligonucleotide from said biological sample that contains a loci corresponding to position 17460 of SEQ ID NOs 1 and 2; detecting in the oligonucleotide the identity of a nucleotide that occurs at a loci corresponding to position 17460 of SEQ ID NOs 1 and 2; and comparing the identity of the nucleotide that occurs at a loci corresponding to position 17460 of SEQ ID NOs 1 and 2 in the oligonucleotide to the identity of a nucleotide at position 17 of SEQ ID NO 3 and/or SEQ ID NO 4, wherein the subject is at increased risk of developing MRSA and/or CA-MRSA, or a recurrence of MRSA or CA-MRSA if the nucleotide that occurs at the loci corresponding to position 17460 of SEQ ID NOs 1 and 2 in the oligonucleotide is the same as the identity of the nucleotide at position 17 of SEQ ID NO 4, and wherein the subject is not at increased risk of developing MRSA and/or CA-MRSA, or a recurrence of MRSA or CA-MRSA if the nucleotide that occurs at the loci corresponding to position 17 of SEQ ID NOs 3 and 4 in the oligonucleotide is the same as the identity of the nucleotide at position 17460 of SEQ ID NO 2.

[0319] We believe and describe for the purposes of this document that any single or combination of SNPs a1-m13, as described herein, can also be used to identify MRSA and SSI high risk individuals.

[0320] Obtaining Oligonucleotides from Patients and Subjects

[0321] Biological samples may be any material or fluid (blood, lymph, etc.) derived from the body of a subject, that contains or may contain genomic DNA (chromosomal and mitochondrial DNA) or other oligonucleotides such as, for example, mRNA that derive from genomic DNA, or an organ or tissue extract and culture fluid in which any cells or tissue preparation from a subject has been incubated. Methods of obtaining biological samples and methods of obtaining oligonucleotide molecules such as DNA and RNA from a biological sample are well known in the art, such as blood draws, cheek cell swabs, biopsies and the like.

[0322] For purposes of obtaining at least one oligonucleotide from said biological sample that contains a loci corresponding to position 17460 of SEQ ID NOs 1 and 2, or any single or combination of SNPs a1-m13; DNA or other oligonucleotides, such as pre-mRNA, can be extracted or partially purified from the biological sample for further processing by techniques known to those skilled in the art (see, e.g., U.S. Pat. Nos. 6,548,256 and 5,989,431; Hirota et al. (1989) Jinrui Idengaku Zasshi. 34: 217-23 and John et al. (1991) Nucleic Acids Res. 19:408, the disclosures of which are incorporated by reference in their entireties). For example, high molecular weight DNA may be purified from cells or tissue using proteinase K extraction and ethanol precipitation. DNA, however, may be extracted from an animal specimen using any other suitable methods known in the art.

[0323] Alternatively, a purification step may be not be needed where probes such as those described below may operate to detect the presence of a SNP by directly hybridizing to genomic DNA in situ in the biological sample, such that obtaining at least one oligonucleotide from said biological sample that contains a loci corresponding to position 17 of SEQ ID. NO 1 and 2, or any single or combination of SNPs a1-m13; may occur without an oligonucleotide extraction step from the biological sample. The biological sample may be partially processed (i.e., homogenization, partial purification) prior to hybridization to facilitate the hybridization step.

[0324] Detecting SNP Polymorphisms

[0325] Any method of detecting the identity of individual nucleotides at SNP loci may be used to practice this invention.

[0326] In one aspect, detecting the identity of the SNP corresponding to position 17460 of SEQ ID NOs 1 and 2; or any single SNP or any combination of SNPs a1-m13, of the present invention, may be performed by sequencing the region of the genomic DNA sample that spans the identified polymorphic locus or SNPs 1a to m13. Many methods of sequencing genomic DNA are known in the art, and any such method can be used, see for example, Sambrook et al. (2001) Molecular Cloning: A Laboratory Manual, 3rd ed., Cold Spring Harbor Press. For instance, as described below, a DNA restriction fragment spanning the location of the SNP of interest can be amplified using the polymerase chain reaction, then subjected to further genomic sequencing methods.

[0327] In other aspects, detecting the identity of the SNP corresponding to position 17460 of SEQ ID NOs 1 and 2; or any single or combination of SNPs a1-m13 of the present invention may be performed by the use of allele-specific probes that hybridize to a region of DNA containing the allele of interest. The probes may be further tagged with a detection signal to aid in detecting the presence of the allele in the biological sample. Probes and detection signals are described below.

[0328] Amplification

[0329] A genomic oligonucleotide spanning the location of the SNP of interest in the FAM129B gene may also be amplified as part of the detection step. More specifically, detecting the identity of SNP of the present invention may comprise DNA amplification to amplify specific genomic sequences or regions containing the SNP correlated to healthy and/or recurrent CA-MRSA subject phenotypes, by one of several known methods of DNA amplification, such as PCR. As noted above, the PCR amplification process involves a cyclic enzymatic chain reaction for preparing exponential quantities of a specific nucleic acid sequence. It requires a small amount of a sequence to initiate the chain reaction and oligonucleotide primers that will hybridize to the sequence. In PCR the primers are annealed to denatured nucleic acid followed by extension with an inducing agent (enzyme) and nucleotides. This results in newly synthesized extension products. Since these newly synthesized sequences become templates for the primers, repeated cycles of denaturing, primer annealing, and extension results in exponential accumulation of the specific sequence being amplified. The extension product of the chain reaction will be a discrete nucleic acid duplex with a termini corresponding to the ends of the specific primers employed.

[0330] The methods of the present invention may use oligonucleotide primers to amplify specific, genomic sequences containing the SNP correlated to healthy and/or recurrent CA-MRSA subject phenotypes. Such primers should be of sufficient length to enable specific annealing or hybridization to the nucleic acid sample. The sequences typically will be about 8 to about 44 nucleotides in length, but shorter or longer sequences may be used. Sequences from about 14 to about 50, may be advantageous for certain embodiments. The design of primers is well known to one of ordinary skill in the art. Primers may comprise sequences upstream or downstream of the location of the SNP, but not contain the SNP itself (begin or end at, e.g., 5-1000 base pairs upstream or downstream of the location of the SNP), or comprise a sequence comprising the SNP. Such primers may be used to specifically amplify one allele or another at that SNP location. In any case, primers should be designed such that the SNP is contained within the amplified sequence. For instance, suitable primers may be designed using sequences within SEQ ID NO 1 (the FAM129B gene) upstream or downstream from the location of the SNP at position 17 of SEQ ID NOs 3 and 4; or any single or combination of SNPs a1-m13, and primers upstream or downstream from the location of the SNP.

[0331] Where it is desired to amplify a fragment of DNA that comprises a SNP according to the present invention, the forward and reverse primers may have contiguous stretches of about 6, 7, 8, 9, 10, 11, 12, 13, 14, 15, 16, 17, 18, 19, 20, 21, 22, 23, 24, 25, 26, 27, 28, 29, 30, 31, 32, 33, 34, 35, 36, 37, 38, 39, 40, 41, 42, 43, 44, 45, 46, 47, 48, 49, 50 or any other length from 5 to 1500 nucleotides in length, with preferred lengths of 8 to 30 sequences and typically less than 50, 100 or 150 or less. The sequences to which the forward and reverse primers anneal are advantageously located on either side of the particular nucleotide position that is substituted in the SNP to be amplified (e.g., position 17 of SEQ ID NOs 3 and 4); or including any single or combination of the positions of SNPs a1-m13.

[0332] Oligonucleotide primers can be produced by a conventional production process for general oligonucleotides. They can be produced, for example, by a chemical synthesis process or by a microbial process that makes use of a plasmid vector, a phage vector or the like. Further, it is suitable to use a nucleic acid synthesizer.

[0333] Oligonucleotide Sequencing.

[0334] As noted above, detecting the identity of the SNP corresponding to position 17 of SEQ ID NOs 3 and 4 of the present invention may be performed by sequencing the region of the genomic DNA sample that spans the FAM 129B polymorphic locus, or any of the SNP positions as described as SNP 1a to m13. Reagents allowing the sequencing of reaction products can be utilized herein. For example, chain-terminating nucleotides will often be incorporated into a reaction product during one or more cycles of a reaction. Commercial kits containing the reagents most typically used for these methods of DNA sequencing are available and widely used. PCR exonuclease digestion methods for DNA sequencing can also be used. Many methods of sequencing genomic DNA are known in the art, and any such method can be used, see for example Sambrook et al. (2001) Molecular Cloning: A Laboratory Manual, 3rd ed., Cold Spring Harbor Press. For example, as described below, a DNA fragment spanning the location of the SNP of interest can be amplified using the polymerase chain reaction or some other cyclic polymerase mediated amplification reaction. The amplified region of DNA can then be sequenced using any method known in the art. Advantageously, the nucleic acid sequencing is by automated methods (reviewed by Meldrum, (2000) Genome Res. 10: 1288-303, the disclosure of which is incorporated by reference in its entirety), for example using a Beckman CEQ 8000 Genetic Analysis System (Beckman Coulter Instruments, Inc.). Methods for sequencing nucleic acids include, but are not limited to, automated fluorescent DNA sequencing (see, e.g., Watts & MacBeath, (2001) Methods Mol. Biol. 167: 153-70 and MacBeath et al. (2001) Methods Mol. Biol. 167:119-52), capillary electrophoresis (see, e.g., Bosserhoff et al. (2000) Comb Chem High Throughput Screen. 3: 455-66), DNA sequencing chips (see, e.g., Jain, (2000) Pharmacogenomics. 1: 289-307), mass spectrometry (see, e.g., Yates, (2000) Trends Genet. 16: 5-8), pyrosequencing (see, e.g., Ronaghi, (2001) Genome Res. 11: 3-11), and ultrathin-layer gel electrophoresis (see, e.g., Guttman & Ronai, (2000) Electrophoresis. 21: 3952-64), the disclosures of which are hereby incorporated by reference in their entireties. The sequencing can also be done by a commercial company. Examples of such companies include, but are not limited to, the University of Georgia Molecular Genetics Instrumentation Facility (Athens, Ga.) or SeqWright DNA Technologies Services (Houston, Tex.).

[0335] Oligonucleotide Hybridization

[0336] Detecting the identity of a SNP corresponding to position 17 of SEQ ID NOs 3 and 4 of the present invention, and the SNPs corresponding to the positions provided and described as SNPs “1a” to “13m,” may be performed by the use of allele-specific probes that hybridize to a region of DNA containing the allele of interest.

[0337] One example method for determining the genotype at the polymorphic locus encompasses obtaining a biological sample that includes a nucleic acid sample, hybridizing the nucleic acid sample with a probe, and disrupting the hybridization to determine the level of disruption energy required wherein the probe has a different disruption energy for one allele as compared to another allele. In one example, there can be a lower disruption energy, e.g., melting temperature, for an allele that harbors a cytosine residue at a polymorphic locus, and a higher required energy for an allele with a different residue at that polymorphic locus. This can be achieved where the probe has 100% sequence identity with one allele (a perfectly matched probe), but has a single mismatch with the alternative allele. Since the perfectly matched probe is bound more tightly to the target DNA than the mismatched probe, it requires more energy to cause the hybridized probe to dissociate.

[0338] In a further step of the above method, a second (“anchor”) probe may be used. Generally, the anchor probe is not specific to either allele, but hybridizes regardless of what nucleotide is present at the polymorphic locus. The anchor probe does not affect the disruption energy required to disassociate the hybridization complex but, instead, contains a complementary label for using with the first (“sensor”) probe.

[0339] Hybridization stability may be influenced by numerous factors, including thermoregulation, chemical regulation, as well as electronic stringency control, either alone or in combination with the other listed factors. Through the use of stringency conditions, in either or both of the target hybridization step or the sensor oligonucleotide stringency step, rapid completion of the process may be achieved. This is desirable to achieve properly indexed hybridization of the target DNA to attain the maximum number of molecules at a test site with an accurate hybridization complex. By way of example, with the use of stringency, the initial hybridization step may be completed in ten minutes or less, more advantageously five minutes or less, and most advantageously two minutes or less. Overall, the analytical process may be completed in less than half an hour.

[0340] In one mode, the hybridization complex is labeled and the step of determining the amount of hybridization includes detecting the amounts of labeled hybridization complex at the test sites. The detection device and method may include, but is not limited to, optical imaging, electronic imaging, imaging with a CCD camera, integrated optical imaging, and mass spectrometry. Further, the amount of labeled or unlabeled probe bound to the target may be quantified. Such quantification may include statistical analysis. The labeled portion of the complex may be the target, the stabilizer, the probe or the hybridization complex in toto. Labeling may be by fluorescent labeling selected from the group of, but not limited to, Cy3, Cy5, Bodipy Texas Red, Bodipy Far Red, Lucifer Yellow, Bodipy 630/650-X, Bodipy R6G-X and 5-CR 6G. Colorimetric labeling, bioluminescent labeling and/or chemiluminescent labeling may further accomplish labeling. Labeling further may include energy transfer between molecules in the hybridization complex by perturbation analysis, quenching, electron transport between donor and acceptor molecules, the latter of which may be facilitated by double stranded match hybridization complexes. Optionally, if the hybridization complex is unlabeled, detection may be accomplished by measurement of conductance differential between double stranded and non-double stranded DNA. Further, direct detection may be achieved by porous silicon-based optical interferometry or by mass spectrometry. In using mass spectrometry no fluorescent or other label is necessary. Rather detection is obtained by extremely high levels of mass resolution achieved by direct measurement, for example, by time of flight (TOF) or by electron spray ionization (ESI). Where mass spectrometry is contemplated, probes having a nucleic acid sequence of 50 bases or less are advantageous.

[0341] The label may be amplified, and may include, for example, branched or dendritic DNA. If the target DNA is purified, it may be un-amplified or amplified. Further, if the purified target is amplified and the amplification is an exponential method, it may be, for example, PCR amplified DNA or strand displacement amplification (SDA) amplified DNA. Linear methods of DNA amplification such as rolling circle or transcriptional runoff may also be used.

[0342] A detectable label can be incorporated into a nucleic acid during at least one cycle of an amplification reaction. Spectroscopic, photochemical, biochemical, immunochemical, electrical, optical or chemical means can detect such labels. Useful labels in the present invention include fluorescent dyes (e.g., fluorescein isothiocyanate, Texas red, rhodamine, and the like), radiolabels (e.g., ³H, ¹²⁵I, ³⁵S, ¹⁴C, ³²P, etc.), enzymes (e.g., horseradish peroxidase, alkaline phosphatase etc.), calorimetric labels such as colloidal gold or colored glass or plastic (e.g., polystyrene, polypropylene, latex, etc.) beads. The label is coupled directly or indirectly to a component of the assay according to methods well known in the art. As indicated above, a wide variety of labels are used, with the choice of label depending on sensitivity required, ease of conjugation with the compound, stability requirements, available instrumentation, and disposal provisions. Non-radioactive labels are often attached by indirect means. Polymerases can also incorporate fluorescent nucleotides during synthesis of nucleic acids.

[0343] To label an oligonucleotide with the fluorescent dye, one of several conventionally known labeling methods can be used (Tyagi & Kramer (1996) Nature Biotechnology 14: 303-308; Schofield et al. (1997) Appl. and Environ. Microbiol. 63: 1143-1147; Proudnikov & Mirzabekov (1996) Nucl. Acids Res. 24: 4532-4535). Alternatively, the oligonucleotide may be labeled with a radiolabel e.g., ³H, ¹²⁵I, ³⁵S, ¹⁴C, ³²P, etc. Well-known labeling methods are described, for example, in Sambrook et al. (2001) Molecular Cloning: A Laboratory Manual, 3rd ed., Cold Spring Harbor Press. The label is coupled directly or indirectly to a component of the oligonucleotide according to methods well known in the art. Reversed phase chromatography or the like used to provide a nucleic acid probe for use in the present invention can purify the synthesized oligonucleotide labeled with a marker. An advantageous probe form is one labeled with a fluorescent dye at the 3′- or 5′-end and containing G or C as the base at the labeled end. If the 5′-end is labeled and the 3′-end is not labeled, the OH group on the C atom at the 3′-position of the 3′-end ribose or deoxyribose may be modified with a phosphate group or the like although no limitation is imposed in this respect.

[0344] During the hybridization of the nucleic acid target with the probes, stringent conditions may be utilized, advantageously along with other stringency affecting conditions, to aid in the hybridization. Detection by differential disruption is particularly advantageous to reduce or eliminate slippage hybridization among probes and target, and to promote more effective hybridization. In yet another aspect, stringency conditions may be varied during the hybridization complex stability determination so as to more accurately or quickly determine whether a SNP is present in the target sequence.

[0345] A SNP-specific probe can also be used in the detection of the SNP in amplified specific nucleic acid sequences of the target gene FAM129B, or any single or combination of SNPs a1-m13, such as the amplified PCR products generated using the primers described above. In certain embodiments, these SNP-specific probes consist of oligonucleotide fragments. Advantageously, the fragments are of sufficient length to provide specific hybridization to the nucleic acid sample. The use of a hybridization probe of between 10 and 50 nucleotides in length allows the formation of a duplex molecule that is both stable and selective. Longer probes may be used. Molecules having complementary sequences over stretches greater than 12 bases in length are generally advantageous, in order to increase stability and selectivity of the hybrid, and thereby improve the quality and degree of particular hybrid molecules obtained. One will generally prefer to design nucleic acid molecules having stretches of 16 to 24 nucleotides, or even longer where desired. A tag nucleotide region may be included, as at the 5′ end of the primer that may provide a site to which an oligonucleotide sequencing primer may hybridize to facilitate the sequencing of multiple PCR samples.

[0346] The probe sequence must span the particular nucleotide position that may be substituted in the particular SNP to be detected, here, the positions provided for SNPs 1a to m13, such as position 17 of SEQ ID NOs 3 and 4 for SNP 1a. Advantageously, two or more different “allele-specific probes” may be used for analysis of a SNP, a first allele-specific probe for detection of one allele, and a second allele-specific probe for the detection of the alternative allele. For example, one probe could be used for detection of the adenosine at position 17 of SEQ ID NO. 3 and another probe could be used for detection of cytosine at position 17 of SEQ ID NO. 4, or any single or combination of SNPs a1-m13.

[0347] It will be understood that this invention is not limited to the particular primers and probes disclosed herein and is intended to encompass at least nucleic acid sequences that are hybridizable to the nucleotide sequence disclosed herein, the complements or any suitable fragment thereof, or to functional sequence analogs of these sequences. Homologs (i.e., nucleic acids derived from other species) or other related sequences (e.g., paralogs) can be obtained under conditions of standard or stringent hybridization conditions with all or a portion of the particular sequence as a probe using methods well known in the art for nucleic acid hybridization and cloning.

[0348] Advantageously, probes may be affixed to substrates and used in “microarray” and other high-throughput detection applications such as those used in the Example below and which are well known in the art. Microarrays can show the presence of one or both SNP alleles, copy number (such as whether an individual is homozygotic, or heterozygotic for a particular polymorphism), and thus provide a genotype for an individual subject.

[0349] Subjects at Increased Risk of MRSA

[0350] In one embodiment of the present invention, subjects with at least one or more copies of the allele corresponding to position 17 of SEQ ID NO 3 are at increased risk of developing MRSA and/or HA or CA-MRSA, or a recurrence of MRSA or HA or CA-MRSA. In another embodiment of the present invention, subjects with at least one or more copies of the allele corresponding to position 17 of SEQ ID NO 4 are not at increased risk of developing at developing MRSA and/or CA-MRSA, or a recurrence of MRSA or CA-MRSA. This analysis of the SNP we name “a1” herein can also be used with other appropriate sequences with all the other critical SNPs described herein as a1 to m13 and any combinations thereof.

[0351] Other SNPs, or other biomarkers, such as gene or protein biomarker, miRNA and the like, the levels or presence/absence of which are correlated with increased risk of developing MRSA or HA or CA-MRSA, or the occurrence of recurrent MRSA or HA or CA-MRSA may also be used alone or in conjunction with the SNP of the present invention to diagnose subjects who are at increased risk of developing MRSA or HA or and/or CA-MRSA, or a recurrence of or HA or MRSA or CA-MRSA.

[0352] Other SNPs or biomarkers may identify a structurally or functionally abnormal FAM129B gene caused by a point mutation(s), a deletion, a truncation, or a translocation of at least a portion of the FAM129B gene, or the other genes or other inter gene regions we describe herein. An exemplary biomarker may identify and/or detect the presence of (a) a decrease or an increase in expression of the FAM129B gene (as compared to a control group which is not at an increased risk of developing MRSA or CA-MRSA, or recurrent MRSA or CA-MRSA) or (b) the abnormal methylation of at least a part of the FAM129B gene. In one embodiment, methods to detect a structurally or functionally abnormal FAM129B gene may include using an oligonucleotide primer that is complementary to or identical to a portion of SEQ ID NO 3 to amplify an oligonucleotide sample from a subject (and the amplified oligonucleotides may then be sequenced); or hybridizing oligonucleotides in a sample from a subject to an oligonucleotide probe having a sequence that is complementary to or identical to a portion of SEQ ID NO 3.

[0353] In many cases a patient may exhibit more than one SNP that indicates a greater than normal risk of acquiring a MRSA or SSI infection. The discovery of more than one MRSA indicating SNP base in a person is not always indicative of a greater chance of becoming infected than if only one SNP base is found. In some cases the greater the number of different MRSA high risk SNPs an individual has, the greater confidence one can have that the individual is at high risk of developing a MRSA infection following exposure to the MRSA bacteria. In other cases just one, or any combination of 2 or more alleles with provide great confidence that the individual is at high risk of developing a MRSA infection following exposure to the MRSA bacteria.

[0354] Treatment of Patients at Increased Risk of MRSA and or Recurrent MRSA

[0355] In some aspects of the method, subjects found to be at increased risk of developing MRSA, HA-MRSA, CA-MRSA, SSI or having a recurrence of MRSA, HA-MRSA, CA-MRSA or SSI may be treated with an antibiotic effective against MRSA. In other aspects, subjects found to be at increased risk of developing MRSA or having a recurrence of MRSA can be treated with appropriate topical and/or nasal treatments to remove surface colonies of or prevent colonization by skin-surface or intranasal populations of MRSA. Appropriate treatments may be increased sanitation (more frequent hand washing with regular or antibiotic soaps such as Hibiclens (4% clorhexidine), topical antibiotic treatments, and oral antibiotics, mouth rinses and nasal ointments containing antibiotics. See, e.g., Buehlmann, M. et al. “Highly effective regimen for decolonization of methicillin-resistant Staphylococcus aureus carriers” Infect. Control. Hosp. Epidemiol. (2008) 29(8); 510-6.

[0356] A more aggressive treatment of a MRSA, HA-MRSA, CA-MRSA or SSI patient may involve the administration of an antibiotic regime including the repeated and/or prophylactic use of one or more anti-MRSA antibiotics such as Vancomycin, Daptomycin, Linezolid, Ceftaroline, Telavancin, Bactrim and the like. Treatment of MRSA patients often includes decolonization efforts, frequent monitoring, long term follow-up and special treatment for any further surgeries (e.g. surgical prescreening for MRSA and antibiotic treatment for prophylaxis) including long duration evaluation and monitoring for infection. Treatment for patients at normal risk of MRSA infection could involve as little as incision and drainage followed by administration of a common antibiotic or in some cases no antibiotic at all.

[0357] Kits

[0358] Kits comprising the methods and devices to determine the MRSA risk assessment are described here and methods to make and use such kits, using the information and descriptions provided herein would be known to one skilled in the art given the descriptions provided.

[0359] Some embodiments of the present invention comprise a kit for determining whether a subject is at increased risk of developing MRSA, or a recurrence of MRSA comprising at least one primer for amplification of one or more nucleotides that occur at a loci corresponding to position 17 of comparison SEQ ID NOs 3, 4, and the SNPs a1-m13 described herein or any combination thereof from a biological sample from the subject.

[0360] Other embodiments of the present invention comprise a kit for determining whether a subject is at increased risk of developing MRSA or SSI comprising at least one probe for detection of one or more nucleotides that occur at a loci corresponding to the loci and positions of SNPs a1-m13 described herein or any combination thereof from a biological sample from the subject. For example for SNP a1, one would create a kit to probe position 17 of comparison SEQ ID NOs 3 and 4 of the FAM 129 B gene.

[0361] Some embodiments of the invention may comprise one or more probes for use in determining whether a subject is at increased risk of developing MRSA, CA-MRSA, HA-MRSA, SSI or a recurrence of MRSA, CA-MRSA, HA-MRSA or SSI wherein the probe or probes comprise the oligonucleotide(s) described by SNP a1 using portions of SEQ ID NOs 3 and/or 4; and the nucleotides for control or normal and MRSA or SSI high risk, such as are described by SNPs a1-m13 described herein or any combination thereof. Other embodiments of the invention may comprise an amplification product for use in determining whether a subject is at increased risk of developing MRSA, CA-MRSA, HA-MRSA, SSI or a recurrence of MRSA, CA-MRSA, HA-MRSA, or SSI wherein the amplification product comprises an oligonucleotide sequence comprising SEQ ID NOs 3 and/or 4; and the SNPs a1-m13 described herein or any combination thereof. Other embodiments of the invention may comprise amplification primers for use in determining whether a subject is at increased risk of developing MRSA, CA-MRSA, HA-MRSA, SSI or a recurrence of MRSA, CA-MRSA, MA-MRSA or SSI wherein the amplification primers comprise oligonucleotide sequences in any of the sequences in the Sequence listing, including SEQ ID NOs 1-37, and those oligonucleotide immediately flanking the location of the SNPs a1 to m13, and critical SNP positions identified in for SNPs a1 to m13 and from SEQ ID NOs 1-37: comprising SEQ ID NOs 1-37 and oligonucleotide sequences in SEQ ID NOs 1-37 and immediately flanking the location of the critical SNP positions of SEQ ID NOs 1-37 or comprise SEQ ID NOs 1-37. And for all of these situations and uses including all single and combinations of all oligonucleotides sequences identifiable from SEQ ID NOs 1, 2, 3, 4, 5, 6, 7, 8, 9, 10, 11, 12, 13, 14, 15, 16, 17, 18, 19, 20, 21, 22, 23, 24, 25, 26, 27, 28, 29, 30, 31, 32, 33, 34, 35, 36, and 37, and every possible combination of those SNPs and genes.

[0362] Risk Profile

[0363] Clinically, a biomarker panel for risk of MRSA infection, here Risk Profile, will allow for a more aggressive approach in treatment for patients who are at high risk for MRSA infections and especially for patients who develop their first MRSA infection. Currently these patients go unrecognized until they have several infections before more aggressive treatment regimens are prescribed in order to eradicate the MRSA from their skin. Being able to determine what patients would benefit from, i.e., those who need early aggressive treatment to reduce recurrences, readmissions, and morbidity would be of substantial benefit.

[0364] Similarly, being able to determine a subset of surgical patients in whom aggressive post-surgical prophylactic therapy would prevent infections would be of tremendous value and reduce complication rates, readmissions, transmission and infection of others, length of stay, as well of overall cost and morbidity and mortality. Such a test or diagnostic with appropriate treatments or conditions provided could become the standard of care for all patients who are to undergo surgery. Since the test determines genetic risk for infection, it would only need to be run once, ever, for any patient, for his or her lifetime. It could be used for patients who have never before been exposed to MRSA and thus those whose susceptibility to SSI and MRSA and related staph infections are unknown. It could be used to distinguish and accurately diagnose those patients who have been incorrectly diagnosed as being at high risk of getting a MRSA infection but who in fact are normal and not at high risk. It could be used to confirm those who have had one or two previous MRSA infections are indeed at high risk of getting another MRSA infection and who have the greatest need of receiving the aggressive treatments described herein and known to those skilled in the art of prescribing and giving aggressive MRSA and SSI treatments.

[0365] Risk Profiling from the use of Biomarker Panels coupled with appropriate treatment. Risk Profiling can involve both the evaluation and detection of biomarkers, the generic factors and also the evaluation of traditional risk factors that may also be coupled with treatment. These two types of risk factors may be created and used independently or they may be combined together and or combined with other factors.

[0366] The following types of information are typically collected, assessed and analyzed in order to make biomarker panels and perform risk profiling.

[0367] Part 1.

[0368] The Genetic Risk Profile is a summary of the number of, and analysis of, the critical SNP positions and critical SNP nucleotides as measured and detected in the patient. This may include: the total number of MRSA high risk SNPs and nucleotides with a description of those SNPs and MRSA high risk genes involved, for the described SNPs, both normal and the same information for MRSA low risk SNPs, with a summary of those measurements and results for some or all of the described critical SNPs at the critical SNP positions, from a1 to m13 as described herein and their nucleotides and the characterization of those nucleotides as high or normal risk, including SNPs from a1 to m13 as described herein, and any combination thereof, which are the factors collectively described here as the “genetic factors.”

[0369] Part 2.

[0370] Physical MRSA risk factors are based on knowledge of the patient and the patient's medical history; most physical risk factors are known or will be learned by caregivers skilled in the art. The list of physical MRSA here is intended only to provide examples rather than provide an exhaustive list. Traditional risk factors are often collected from patients during intake, from pre surgical evaluations and questions, from the settings past and present of the patient, from interviews with the patient, the patient's medical history, the patient's family or from those who know the patient. The questions might include some or all of the following.

[0371] Has the patient or members of their family ever previously been told they may have or did they ever previously have MRSA?

[0372] Has the patient or members of their family ever previously been told they may have or did they ever previously have a staph infection?

[0373] Has the patient or members of their family ever previously been told they may have or did they ever previously have a persistent skin infection?

[0374] Has the patient or members of their family ever previously been told they may have or did they ever previously have any of the following:

[0375] administration of multiple antibiotics to treat a single infection,

[0376] ulcers and pressure ulcers, surgical wounds,

[0377] nasogastric or endotracheal tubes, drains, and urinary or intravenous catheterization,

[0378] admission into intensive care.

[0379] Were those having the following given an increased risk assessment: the people who were preciously admitted into intensive care, those that have had surgical wounds, pressure ulcers, and or intravenous catheterization.

[0380] Has the patient or members of their family ever previously been told they are at risk of developing MRSA following surgery?

[0381] Among the more important physical risk factors are: prior admittance into intensive care, those that have had surgical wounds, pressure ulcers, and or intravenous catheterization.

[0382] Part 3. The Overall Risk Profile.

[0383] The Overall Risk Profile for a patient is any combination of the genetic and physical risk factors. Various weights of importance can be given to the risk factors by the treating caregiver and appropriate action or inaction taken. The generic risk factors may be considered or in combination with the physical risk factors.

[0384] The Overall Risk Profile is created by assigning values to both the genetic and traditional risk factors and for both MRSA patients, or “high risk” patients, and “normal” or average risk patients. Treatment decisions may be made depending on the various risk factors.

### Examples

[0385] Study Design.

[0386] Fourteen participants were contacted and consented to collection of blood samples for analysis. Collection and analysis were approved through the Beaumont Institutional Review Board. Eleven participants were patients who had proven history of and were often seen for recurrent CA-MRSA but had no known specific risk factors for developing recurrent infection. Three participants were controls and were cohabiting spouses of three of the patients. The controls were exposed to the same environmental risks as the patients and to the skin of the patient but never developed a MRSA infection. This gave controls who were directly and closely exposed to the patient (i.e., shared a bed) and were thus within the same environment but did not become infected with MRSA.

[0387] Methods.

[0388] Collection and analysis was done via the Beaumont BioBank. DNA was isolated from blood samples of the MRSA-infected patients, the associated controls, and a subset of the SSI patients. The DNA was used for preparation of DNA libraries. Library prep involved fragmenting the original DNA, subsequent processing to add primers and adaptors, and finally enriching for the regions of interest. Probes for the enrichment process were designed through Illumina's Design Studio using Nextera Rapid Capture Custom Enrichment. This process allows for the design of enrichment probes that cover the entire coding and non-coding sequence of any gene of interest. Once libraries were created, they were sequenced on the Illumina NextSeq 500. The resulting data files were uploaded to Illumina BaseSpace for de-multiplexing and file conversion. Alignment was done with NextGENe software from Soft Genetics, with additional analysis done with Ingenuity Variant Analysis.

[0389] Analysis was performed in an automated and blinded manner. Genomic DNA from all participants was prepared for analysis using Affymetrix Genome-wide Human SNP 6.0 microarrays. Each array contains more than 946,000 probes for detection of copy number variation and more than 906,000 single nucleotide polymorphism (SNP) probes for genotyping. One array per patient sample was prepared according to the manufacturer's protocol and scanned with an Affymetrix GeneChip® Scanner 3000. Affymetrix Genotyping Consol software and the Partek Genomics Suite were used for analysis and visualization of the data.

[0390] Data was subjected to per SNP and per sample quality control to minimize false positives. None of the remaining samples from individuals were excluded based on the expression data. SNPs from X and Y chromosomes were excluded from further analysis. SNPs with no call rates <5% and minor alleles frequencies >5% were included for further analysis. The final number of SNPs included in the analysis was 633,268.

[0391] A chi-square test was used to set the phenotype to be tested for association with the SNPs. Three models were tested:

1. Allele: frequencies of alleles (A vs. A′) were compared between CA-MRSA subjects and the control subjects
2. Genotype: frequencies of three possible genotypes (AA, AA′, and A′A′) were compared between CA-MRSA subjects and the control subjects
3. Dominant/Recessive: two combinations of genotypes are compared between CA-MRSA subjects and the control subjects—Dominant (AA+AK vs. A′A′, with A as the causal variant) and Recessive (AA vs. AA′+A′A′, with A as the causal variant).

[0392] In general we mention that one of the more significant SNPs of interest, (p value 1.21×10-7), was located within the open reading frame of a gene identified as FAM129B. This SNP (SNP_A 8307872, rs2249861) was present with two copies of a single form in all 11 MRSA patients and with two copies of another form in all three controls. There were no participants who were heterozygous (one copy of the gene in each form).

[0393] The particular SNP in gene FAM129B which segregated between the control and CA-MRSA populations was located in an intron sequence. The SNP has the following sequence in CA-MRSA subjects: GGGGGCAAGTTAGTCAACCTGTCTGAGTCTTAG [SEQ ID NO 3] with the SNP location at position 17 underlined. Control populations had the alternate allele: GGGGGCAAGTTAGTCACCCTGTCTGAGTCTTAG [SEQ ID NO 4] at position 17.

[0394] The FAM129B gene codes for a protein found in the tight junctions of skin cells and has been linked to wound healing and the ability of melanoma to invade the skin 2-4.

[0395] Other SNPs of interest are as follows:

[0396] The location of the SNPs in the genome. Most of the SNPs we describe are within genes but one SNP is between two genes. The SNPs or markers we describe are in or near the following genes: FAM 129B (1 SNP), RBM6 (1 SNP), KANK 4 (1 SNP), Col 13A1 (1 SNP), COL 19A1 (5 SNPs), IGSF8 (1 SNP), ADARB2 (1 SNP), DCT (1 SNP), and the last SNP lies between genes LTF and CCRL-2. The number in parenthesis is the number of SNPs associated with that gene.

[0397] The SNPs in this document are described with a unique alpha numeric number and those SNP numbers and the closest genes are:

“a1” is known as SNP/rs2249861 and it is within the FAM 129B gene;
“b2” is known as SNP/rs2352969 and it is within the RBM6 gene;
“c3” is known as SNP/rs12758910 and it is within the KANK 4 gene;
“d4” is known as SNP/rs2642572 and it is outside and between two genes, the C10orf35 isoform X1 gene and the Col 13A1 gene;
“e5” is known as SNP/rs3793038 and it is within the Col 19A1 gene;
“f6” is known as SNP/rs3805987 and it is within the Col 19A1 gene;
“g7” is known as SNP/rs9454944 and it is within the Col 19A1 gene;
“h8” is known as SNP/rs978291 and it is within the Col 19A1 gene;
“i9” is known as SNP/rs978290 and it is within the Col 19A1 gene;
“j10” is known as SNP/rs1131891 and it is within the IGSF8 gene;
“k11” is known as SNP/rs127711411 and it is within the ADARB2 gene;
“l12” is known as SNP/rs4773794 and it is within the DCT gene; and
“m13” is known as SNP/rs4619820 and it is outside and between two genes, CCR2 and LTF.

[0398] The genes are known for the following traits. The chromosomes where the SNPs are located, the sequence information, the useful probes and genetic information are provided above and in the sequence listing.

[0399] IGFS8, is the immunoglobulin superfamily protein 8, is linked to cell motility and polarity, cell adhesion, migration of leukocytes between cells, and infection with parasites and viruses.

[0400] ADARB2, adenosine deaminase RNA-specific B2, is linked to neurologic diseases.

[0401] DCT, dopachrome tautomerase, is found in skin cells and is melanogenic. The DCT-phenotype is associated with enhanced neurotization in benign nevi and with ulceration in thin malignant melanomas. DCT is a mediator of a melanoma stress-resistant pathway, and an antiapoptotic molecule.

[0402] KANK 4 is a homologue of genes involved in the regulation of actin polymerization and cell motility.

[0403] LCT, lactoferrin, stimulates the proliferation and migration of fibroblasts and keratinocytes and enhances the synthesis of extracellular matrix components, such as collagen and hyaluronan.

[0404] RBM6, RNA Binding Motif 6, is a tumor suppressor gene, promotes cell growth, and thus may potentially be involved in wound healing though this hasn't been studied.

[0405] Col 13A1 and Col 19A1 are collagens and thus a major component of the skin. Most of these genes have some role to play in the skin or wound healing.

The application's sequence listing, which the Patent Office published only in electronic form, follows.

SEQUENCE LISTING (37 sequences)

SEQ ID NO: 1 - DNA, 73651 bp, Homo sapiens
caggaactgggccagttccggtcccttccttttggggctctcactctggaggatggggtggatgggaggtaagacttgtgcacaagtccccaggacacaaggcacacggggttcttttttgtttgtttgtttagagaggaggttttgctctgtcactcaggctggagtgcagcggaatgatcatagctcaatgcagcctcaaactcctgggctcaagggatcctcacttcttgacctcccaaagcgtcataggcttaaggcactacagcacccactgacaaggggttctttttctttttcttttcttttcttttttttttttaggcggagtttcactcttgtcaccccggctggactgcaatggcgagatctcgcctcactctcactgcaacctccgcctcccagattcaagcgattctcctgcctcagcctcctgagtagctgggatgacagggccccaccgccatgcccagctaatttttttgtatttttagtagagacggtttcacgatgttggccaggctggtcttgaactcctgagctcagatgatccacctgcctcggtctcctaaagtgctgggattacaggtgtaagccatggcgcctggccactttttttttttttttttttttttgagaccaagtctcactctgttgcccaggctggagtgcagtggctggatcttggctcactgcatcgtctgcctcctgggttcaagggattcctcatgcctcagcctcccggatgggatttcaggcacaggccactacgcccagctaaatttttttttttttttttgagatggagtcttgctctgtctctcaggctggagtgcagtggcgcgatctcagctcactgcaacctccgcctcccagatacaagtgattctcctgcttcagcctcccaagtagatgggatttcaggcacccaccaccacacccagctaatttttttgtgtttttagtagagacagggtttcactgtgttggccaggctggtctcaaattcctgacattgtgagccacctgcctcagcctcccaaagtgctgagattacaagtgtgagccactgtgactggcccaacatttttttttaattaaaaaattaaagccaggtgtagtggtgcatgcctgtagtcccagctactcaggaggctgggtcgggaggattgtttgagcccaggagtttgaggctgcagcaagccatgatcaactcactgcactccagcctgggttacagagcaagaggtcttatccctgaaacaaacaaacaaacaaaaagatatagcagagaagcccattttgtgtttgagaaagagctgaactctaggattggatctggaggatggtgtgggaagcgtggggtattggatctggaggatggtgtgggaagcgtggggtattggatctggaggatggtgtgggaagcgtggggtattggatctggaggatggtgtgggaagcgtggggtattggatctggaggatggtgtgggaagtgtggggtattggatctggaggatggtgtgggaagtgtggggtattggatctggaggatggtgtgggaagtgtggggtattggatctggaggatggtgtgggaagcgtggggtattgcagctctaaagtaggcagagctatgtatgggtctcatcctcatctcttaatttttttggggggagggtggacacagtctcgctctgtcacccaggctgcagtacagtggcgcaatctcggctcactgcaacccctgcctctctggttcaagtgattcttgtgcctcagcctcccgagtagctgggattacagacgtgcaccaccacgcctggctaatttttgtatttttagtagagacgggctttcaccatgttggccaggctggtctcaaactcccgacctcaggtgatccgcccacctcggcctctgaaagtgcgtgagccactgcacctggcctcatctgttactttaaaataaaataacaataaattatttaaaaatagaggctgggcatggtgccttacacctgtaatcccagcactttgggaggccgaggcaggtggatcacaaggttaggagtttgagactagtctggtcaacatggtgaaaccccgtctctactaaaaatacaaaaattagccggacgttgtggcacttggggaggctgaggttgcagtaagctgagatggcgccactacactccagcctggtgacagagcaagactctgtcttgggaaaaaaaaaaatagagacgaggtcttgctatgttgcccaggctggtctcaaactcctgggctcaagcgatcctcctgcctcagcctcccaaagtgttgggattacaggcgtgagccactgtgcctgatctcatcctcatctcttacttatacctcatgaagcctcagttttctctcctgtaaagtgggtgttccccaaaagttgtgaccattcaatgaggcagaagctataaagcactgaactgagcacaggagcctgcaatgaacgggcgcttccattatctttatcatcctgaagttatttctcactccctgcctgtctgctggcacttcagcggccccctgcctgacttcagtgctgttggatccaaccacggaatttgtgcctgggaaggcggtaaggcacccccttcctggaagtttacaagcagaagctctgcacagtagcagaggcccacatgcactatagaagggactttgtaccccatgatgtgtcatggccactgcaggcatgagtgtttcagtataggtctatgaacaaacctgtgaggtcccaaggaccaggtgggtccctcactgtcacgttcccctccagtgcccaggatagtgttctgcacatcatacgtgctccctcaagctcccattgcgactgacgctagtgatgtcatgtcgaaggaggacagtcctggtcctcagagagaaagatttatttaaacagataattgcacacacacaaaatcatgttgaatgtgatgcttgccatgaaggaggagtttaggacactggggagggggtgataataatggcaggcctgacctagtaggggggcagggtgcagaaatgtcctctctgatgaagggtaattagctgaggttgaaggctgaatgctgcttggtggggcaagatgcgggaaaaaaatccatgtttcacacagccaggcacggtggctcacgcctgtaatcccagcactgtgggagccaaggcgggcggatcacctgagctcaggagtttgagaccagcctgatcaatatggtgaaaccctgtctctactaaaaataccagaattaaccaggcatagtggcgggtgcctgtaatcccagctactcaggaggctgaggcaggagaatcgcttgagcctgggaggtggaggttgcagtgagcagagatcccgccactgcactccagcctggacgacagagcaagactccatctcaaaagaaaaaaaaaaaaaaaagggcccagcacagtggctcatgcctgtagtcccagcactttgggaagctggggtgggtggatcacgaggtcaggagttcaagaccatcctggccaagatggtaaaaccccgtctctactaaaaataccaaaattagccaggcgtggtggcaggaacctgtaatcccagctacttgagagtctgaggcagagaattgcttgaacccaggaggctgagtttgcagtgagccgagatcgcaccactgcactccagcctgggtgacagagcgagactccatctcaaaaaaaaaaaaaaaagaatccatatttcataagctgtgaggtgggatggagcagggctagtttgaggatgtgaaatctcagtgtggctagagaatggggaggggaagtggggggagggactggcaggggcccccagtgccatgtctggagtctttctctccaggacagtggaagccacagaaggttagaagtgggggaatggcaaggtcgtatctgtgtttacaacaattcctctggctcccagtgaggaatgcatggggggctggaggcagggaggccagttccctggacttggggtggcagtggagctggggagaggtgacagcttggccactgaaagagtaagagggagtttagcagcctgaggccaggtgacagacggaacaggctgtaagctacggacctttccaccacccaacagttaataaagagaggaggtccgggctgggtgccagggtcccttctgcacaatgggccatgccaactgggtaaacagaggtagatacatgatattccttaaaaacaaaatcctgattcattcacactccttgctgtttactggaggtgtttgttttttttctcctggtctatttcaggtttgacaggtttgtggggagagcagagctgggactccgtgccaactgggagggagagggactcatggggagagaaagggcctctccttcttcctacaggactagcaaggggtcttgggctgggctcctgcggaatgctcttgggcaaattgctttccttctctgagtctcggtccaagctctggctctgaccgtctgaaccctcccttttaaagccaaatattattattcttcgcccttggatccctgcttccaaatatgcttgaggatgtggtgggcaggggaggggcggggcaggtttgcagggaggcagtgggcagaagccacttccagagaaaggcctgatgagtcaggacctgtaggtggcattctctgttcaagaggggcaggcccagcaagtgggcagggagaacctttcctctctgctccagatgtagaccattgccaccctttgtccacagccctggcattttcaaccaggttctggggcctgagccaagaaaagggagtgggagcccctggtgaatagagacagcgtccagagtcttagaaaaagaacagatatccctctgccttgcagatttcagaaatccttgctatagaaagaactcttacaaatcaataagaaaaagatagacattcccacagaaaagcaggcagaggatataaattttaaaaaccacaaatggccaggctgggtacggtggctcatacctgtaatcccagcactttgagaggccaagggaggcagatcacttgtggtcaggagttccagaccagcctggccaacatagcaaaaccccatttccactaaaaatacaaaaattagccaggcgtggtggcaggtgcctgtaatcccagctacttgggaagctgaggcaggagaattgcttgaacccagaaggtaggtagagattgcagtgagcagagatcgtgccactgcactctagcctgggcaacagaacgagaccctgtctcgaaataaacaaaataaaaataaaacccacaaatggccactaaatgtgtgaaaagatgtttccatttactcaaaagtaacaaggggacatcaaaatggcctccagcgtgagggcaggggtttccagcattttagagttgagaaattctctgatgtcaaacttcctggaatccttcatagtgctgatgactatgtttatttttctttccttgaaaaaaaaaaaagggcaaataacttcattccttccccacccaaagactgtaacttttttttattacaataattgatttcttaacatatagtagagagagttgagaaagtttaaagagctttacaatctttccagagtgaaaaaaaaaaacaacaaattctgttctggatgctcaggctgcctccccatctggggtcccaccagtccatgccagggcccacccctccttccctgcaggaagtcctagatcagccatctggcttaggccccacaaggactcaccttgcttccttttgctcacactcacgcctttacctgtcacgccttctctgtgcctacctgttccagtgtttgaacaaggattgctgtatacatacaatggaatatatatacatacgtacatacatatatctataaagagggaaggtctcactctgtcacccaagctggagtgtagcggcgagatcacagcacactgcagcctcaaactcctgggctcaaggtcttcctgctttggcctcctagtagctgggactacaagcatgcaccaccaggcccagctaatttttttaaaaaattatttaacgacggggtctcattctgttgcccatgctcgtctcaaactcctggcctcaagcaatcctcttgcctcagcttcccagagtgctggcattatgagtgtgagccaccgtgctcagcctgaatatcattaaaaaaaaaatcctcgcaacaatttattcaactctaaaatgggctttatcattactaccccagaagctgtgaggacagtaggaggcagaaaagtccttggtgtgacacctggtctgtggtccatctccataaatggcagctcttcctgaaccttcttcaagcaggctccttcttgccaatcaggtcccaaggcatcatctcctcctccttcctagaccactttcctagatggcatcccaccccaaccccacttgtcaccctatcccatcttaatgtttattactctctgaagtcattttatttatttgttgtattttttcataagactataacctctatgaagacgaggaccgtgactttcttgcatactgatttatccccaatacctagaatagcatccaacacatagtaggtgcttgcatgtttattttttcactttaaaataaatggtggctcacacctgtaatcccagcactctgggaggcttaggcgggaggatcccttgagctcaggagttggagaccagcctgggcagcatggtgagatcccatctctatgaaaaacattttttaattagctgggtgtggtaacccaagggtgagattggaggatgccttgagcccaggaggccaaggctgcactgagtccatgtttgcaccactgcactccagcctgggcgacacagagagaccttgtctcaaaaataaaaataaaataaactttgttgaagtataattttgatataataaaatgcatccgtttgatgcatctgtacagtttgataaatttagataaatatgttctcttaccaacacctcagtcaagacataggaccatttttatccccctaaagttccctccagatttttttttgccatcaattctccttcatcccatccctagacaaggcagtttttttttggtgtgaaatgaatgaatcttgaattgtcagggactggccccagatttgcggagagctattcacatgtgtgcatagcaccctactgttcacaatgcctttccactttctgtttttttctttggttttgttttgtttttaatggagtctcactctgtcaccaggctggagtgcagtggcacgatcttggctcactgcaacctctgcctcccgggttcaagcgattcttctgcctcagccttctgagcagctgggactacaggcgcgtgccaccatgcccagctaatttttgcatttttaatagagatggggtttcaccatgttggccagactggtctcagactcctgatctcgtgatctgcctgcctcggcctcccaaaatgctgagattacaggcgtgagccattgcgcccggccgcctttccactttcatctcatgtgcctctcacatatgaggccatggatgctcagatggattaggtgacatgtgacagaaggtctccaaagcaagaggagaccttttggatgctcaagttgcctccccatctggggtcccaccctgggccagggaggaacccgtccctgggccagggaggaacccgtccctgggccaggggcctcacatggtaggcaggctgtgggtgttccaggcttgggtgtgccacgaagcctggggaaaggccactgtggccccatctctaacccccctggcctaggcctccagcccagccaagaagatgcctctggtgtccagatgccagctagctccagctagctcctccctgggcagaacagaccctgcagtttgggctatgagaaaaatgaaaagaggttatcagcatcacttgcttctggttgctcagagagaatcagacactgggtgccaggagacttggcctttggccaggttctccctctgcctcactgtgtgcccttagcaagtcactttccctctctgggcctcagtttccacctctataaaaggaaactagtgatccctaaccagcatgacttcaactccacctgatgatgactctttgacgcatgaatgcatcccggccctcaaaggctgggcccctgcccatgctgtccccactccctggaatgctgtttctcagtatctgctgtcaaaagtcttgtttttcaacttccagttctggtcctaccccctctgtgattttccttaaaacagaatgttctgctccttcctcaagcttctctaagctcttgagggcagggactatgaataatagaatgacacgttctgttcattgagagatgatggaccctggtgccaggcactatgctgggcactttgtgatatcatttaaccctcccgcaaaaagcatcattctcttttgacagatgaggtagctgaagttcaaaggggtaatgccacttgtccagggtcacagaggggagggcagcttgggcttccttctcttttcacccccagcatctagcagagggcctggcacacaggtgttgaccacccattgctgaatgactggtaagtgactgaatgcatgaatgaatgcctgcatcactttaatccatttcaaacctacctcctgtggtgtgcacaggcctgaagtacaggtgctcagcaaatttaactgttatcatcatcacttcctgccttatgccacagtcacactaagagctgcccaataacaacgtgaaatgcatgagagaagtggtgagtgcttagttaccaggggtcaacaagcagaaagtggatggccttgtcccagtgcagatcaggagatctgagcaccagcagccaaaggattgagatctggggatcccactggttaacctgactgtctcccctgccagcttgggaggtcctgaaactgaaacacattcccctggcactgcgacccacccatgcccagccccataggctggtgcctgtcggtctccgggttttgattctggtagtcttttgcaaactgtaaagtgctactgctttttccttttctgatttgctctgtcccccaagccgcctcccgagtgaaatgcccatatgctgagcctgaggcaagcccgcctggcactggggcgggggtgccttcgggcccgagccttccccacccccttcctatagctgttgtgcaagaccagcgggcacaccttctggggcaggtcgaatcaaggccagggaacttcctgagcgcgggcagtggcgggcgggacttgggggggcagggggcactgttcagggtagaggagggggcgaacgccgaattccggcccgtaggtccaggcgtcccctgccagtgccccacatcctcctcggcgcgattcttttcccgcgcgggcaaggttggggaggggaggggggtgacactcaggctggagtcccccagagcacccccagtttttcagatgtccccaccagccccgtctctttctctgcttaggtacagggcgggtgcgctcttcgcagtctctccgcggtctccctttctgggaccttctctttgtctccttctccagggcggtcccggcgtccaccgcccctgtgccccgcccgccggaggcagcggagggggcggggcatacggggcgggccctggaggggctgggtggggcgcaggggggtgcaggaccgagggcggggcggggcggggcggggtgggacgcggcgggcgcagggcagcgggcggggagggggcggggttggcctgcgggggcgtggtctggtggggcggagcggggcgccggggtgcagggccgagggcagggagggggccaaggcggccggctggagggacggggcccgaccgggagcggagccggagcggaagccgcagccgggcggcgggagcggcgggagcggcgggagcgggggaagcagggcgggccgggctccatggcgccagcggcgtccgcctgagcagcgcgggcaacagcggcggcgtcggccggatcgggccgcgacacctcctggccatgggggacgtgctgtccacgcacctggacgacgcccggcgccagcacatcgcaggtgagggtcgcgccgcgccacgcgcgcccaggggcctgccggaacccccggaccacgcccccgccccggccagcagttggcgccggggccgggggctcgggggagtcaggccgggccggtgggagctgccagggagcgtgccccgcgtccgagctcgttccctctgagcctgggcgccccttcccgcgctcttctgagcgccacctttcccggctcaaggggactcggaactccttctctcccggaaccccttcggagcccgggcttggcggacccccagcccacgacccctggccgagctggggcaggggtcgcagcctgctgcccacccttggctgtccccgcccagaagcgttgcaagcccatccgctaccagctttgggatctcccagacccagccagctcgcgctcaccttcctccccagccgtcccgtccccagctccgccgggccccagccctggtacacgtggcggaggcttcctgaaggacgcgcccatgaaggcccgggactgattctggggagtggggccagggatcgatggggcgccccggaggcggtggggttgcatgtcctttggcgcagacagcaggctgcccctgctagcagcaggggcccagggaccggtcaccagagtggggggccctcagggccagtcgccagccccttcaaccctgttcttcagccaaccctactctcagcctattactgcacagtggccacttctcccagggacagctgtccccaaggctcctggggaagccggagctgcagagggggcctgggttccttttccccacagactctggagaacagtgagataggatgaggatctcggctgcctgagaaactcctctctggccgatctctcctggctggtggagctgccctgggtggaatcccagcatttgcttcccagacatctgtcctgtacaccttggttttctcctttttgaaatggggtcagtgatttcttccttattaatgagttgttgggaggcttacgtgaagtaactcatgtggcttgcttagcacagagcctggcataggagaggcacttgtatgtggggtgacggttcaggtgggtcgcccctcgctgtctagtgggccctgagcaccgcgtccgcctgcacttatttttgtgtcctgtagaatttcaccaccgtgttctccacgctcccttgagagcaggaagccctgagagcagtggccaggtgtcctttaactccatgtctccagggccgcacccatgctgggcaccagggaggtgctggggagatctgccaagtgactgtggtcccgggccaagtcccaaggccagagtccctcccttgtgccaggcctggggctggctgggcacaggggtgactggggtgatgtgaaaatgaatcggaccctctctagcctctgaccagcgtggggttaagtcctggaaagcctccttatccgaccaggcctggactgtgggaggaggaagggccagggcggagtcttcctgtcccctccctgtcgcagcaagctcctggggctctgtaacagtccctccattcaggacctcctgttgaggcccctcgaggggcctgggtggggtgtgccttgcattcggtggggtttttcctctccccatactcagtgctgggcctccctgtcttcccgtctcctgggctgagaattgccagcccaccctctctcccctggcatgttacaggggaggggactgagaccacagaaggtgaagtgtcctttactggagagggttggatttattttctggataccaggctgggtggaagaaagttgtgcccactcagagcctgctggtctctctcttctccacacttcagtgctatttataatcctctttaaatgcctcgaattcctggtccagactcacctgaggggagttcctgatgtgggggggtggggtgttggaagggggcagcggggaagcctcccagtctccccagaggaagtgagctgcctttgaaatctctgctggaagggaatgagggcgtgtatttgcctcctccagtgatccaggcaccctcctcaccccacccaaggagcagtaggtactctcaaagctggcaattaaaattccagaaccctccctacctgaggccttgttctctgccccagtagaaatgtcagagttagagacatcccttcccacagtgctctgagttcccaggcctgttagggttccaaggtttgacctgcagctttgtgcccgccccaagcaggtgagcaggtgaatgccagcctgcctgcaagtcctggcaaaggtcaagcgtgctcccggccacggtgctgttttgctgccacggcacctttcatcctgggatttcaaagcccctggcaagcagaggcttgtttccacaccaggagccccacggggctggtggcaggatgactcctgcctccttacacgaggcagtgtgccgtgaggaagaatccctggcctgggatctgggaggcctgaggatccttgggtaggccacttcctctccctgggtctcagtttccctagttgtgaaccgaagtgggtgggccactcgatggctgaagtccctttcagctctgagggcctaacaatcccaaattttccccacaaatctcccccagactgaagccagctcaaggtcccagtataatgcctgcaaccttggagtaatatctttttttttttgagacaaggtcttgctctgtcacccaggctggagtgcagtggcatcatcatagctaattgcagcctcgacctcctgggctcaagtgatcctcccacctcagcctcccaagtagctgggactacaggcatgcgccaccatgccgtgctaatttgtgtgtgtgtgtgtgtgtgtgtgtgtgtgtgtgagagagagagagagagacagggtctccctatgttgcccaggttggtcttgaactcctgggctcaaccaatcctcctttgggagccttggcctcccaaagtgctaggattacaggtgtgaacttcccgcccatgaactaacatctttttttttttttttttttttgagacagagtctcactctctgtcccaggctggagtccagtggcacaatctcagcccactgcaacctccacctcctgggttcaagtgattctcctgcttcagccctctgttacaggtacacaccaccatgcttggctgattttggtatttctagtagagacgggggtttcaccatattggtcaggctggtctcgaactcctgacctcaggtgatccaccctcctcagcctcccaaagtgccaagattataggcgtgagccaccacgcccagccaaaaataatagctttattgaggcgtaattcacctaccatacaattcagccacctaaagtgtacacttcagcggtttttagtatattcacagaattgcgcaaccattgccaccatcaatgttggagcattttcatcagcccggaaagaaatcctctactccttagtagtcgctcctgtttcctcctagtccctcctaaatctaggcaaccactgaacattttgtctaattgcaaaagtaatgtgtgcacaggccaggcgtggtggctcacgcctgtaatctcagcactttgggaggctgaggagggcggattgcttgagctggggagttcaagaccagcgtgggcaacatggcaaagccccgtctctagtaaaaatacaaaaaattagccgggcattgtcgtatgcgcctgtggttccagctaattgggaggctgagttggaaggattgcctgagcaaaagtaacacatgtacaaacaatttaggagggtaaaataaaacatgaaaacaccctccatctttctccgttaaatcccacttcccagaagaagtcacttaagtgtggtgtgtcaccatttccaaacctacctctctctgtacatgctcataatagcttggtttataaaaacagattttttttttttttttgagatggcgtctcactcaggctggagtgcagtggcaagatctcagctcactacaacctccgcctcccaggttcaagcaattctcctgcctcagcctcctgagtagctgggattacaggcgtgcaccaccatgcccggctaattttggtatttttagtagagacagggtttcaccatgttggccaggctggtcttgaactcctgacctcaggtgatccacccacctcgacctcccaaagttctgggattacaggcatgagccaccacgcccaacctataaaaagagatattactctatgcttctgtggtttgatttttttcacttggtaaattggtggacatctttctgtgtcagaacacacaagactacctcattcttttcttggtgagttcgtttctgtgcatggatggtttgtctacccagccctctgtgaatgggcatttgggttgtttccactattttgctagtattcacagtgctgcttgaacctgctggtacaaaccctctgtaatattccagtatcagagaggccctgaaatggaactcctgggtcaccttttttttttttttttgatacagagtctcattttgttgcccaggctagagttcagtggcatgatctcggctcattgcaacctccgcctcctgggttcaagcaattctcctgtctcagcctcctgagtagctgggactacaggtgcccaccaccacacctggctaatttttgtatctttagtagagatggggttttaccatattggtcaagttggtctcgaactcttgacctcaggtgatacatctgcctcagcctgccaaattgctgagattataggcgtgagccaccatgccctgcctgggtcaccttttgatagatggacacatagcctttaagaaggcagcaggcgtttgacactctcctgctaagatggaccttagcattgagcattttcatccttttgacaaccagatatgagaagaagggtgtcttaattatttattgagcaaaacaaataatgcttctttccaaagtgattttaaaaacttacctctctgctgggcgcggtgactcacgcttgtaattccagcgctttgggagacaggcaggcagatcacctgaggtcaagagtttgagaccagcctggcaaacatgatgaaaccacgtctctactaaaaaattagccgggcctggtggtgcgtgcctgtagtcccagctacttgggaggctgcggcacaagaatcgcttgaacccgggaggtggaggttgcagtgagacgagatcgcaccattgcactccagcctgggtgacagagtgagactctgtctcaaaaaaaaaaaaaatctacctctcaacatttgggaagtggctgtagatgccaagagtgaagggatggaggggttccaccttctgccacccctcaccctgctgtgtggcttcctctttgctcccctggactttgcagagagaccaggctggccggaagcagtgcctgggcctgggccgctgcccttagccaaggtccgggtcagcccctgggggcgaagtgtctggggatgatgctgtctctctgttgggtcttatataacatgcttttgttggctttgaccctgccttcccctccatccagcctcctctagtccccctgactctgttccttttccactgctggggcctgagtgccggcctcgcctactcagagctgctccagcctcctcggagcctctagtccttcccacacacgctgccaaagggacctttctaaacccacgcggggccatggctgccctccctgctgtccaaggagtgaagcggaaaaacaggactaggaaccactcacccgccgtcctgcgataaccacttcatcctctgggagtacttcccatctgtgtcgatcattacactttaccgggaccatgactcaagtttgtgtcttgcttctttcactacatgatctatagtaaacatctctcccaggtcattaaaacctccctggaagcatccccaaaggctgcattttattccatttgaggacagagggtcactttcccagctttttccctaatgctggacatgaggttgtttctcacatgttggtttgtaggggcaaacagagccactgtgtgtgtttcttttctggctccagtcaacttccctgtcgaagaccgattcatctcccagcccaactcttcccgtgctctgcttccgccaacctgggcatttagagggaggctccttcctgccatctctgagcatcgttcggggctagtgggcttgaaggggctgcctgtgtactggggacggggactgatgaccatggcctctgggtgtgtggccatagagtctagcctgcggtgtgtaggaatggatatatattttctgtctgaagacatggttgatagagcagggaggggcagtaatcaggctcggagtgataactgtaaacattagcaacggtttaactgagcacttgctatgtgccaagccttcctttgtctgtatcatcttattgaattcccacctcagtggcaggcctggatcggatagtccaaggccttagctatttaaaccacgttctgctattagtatgtcatccgtggtgcccagactgggcagggggacactgaaaaaggcctccaagagaggtaagctttcggaggcggggagaggaagtgggaggaggagccgagtgggaatagagcagcttgtgtcagtctccctcccataggttgcacaaatctatcccacccgtcattactcagtctgagactcacagcctctgaccagccccattctccgtccctgcgcccccctcctccttccccgcgggcagagctcatgactcactgcaccccgggctcctgcaagcatcatcctgcggttgcagaaattcctgcactgctttttccttcccctgccccaccccatccacttctgtgctggaggaagaagggtattctgtagacgctgctgggcagaggtttaaggaaggagtccgggcagatgcctaggtttaaaacccgtgagggtggagcaaagccattctcttctcctggtagaatcttagggcctgagtcatggaagggtacaatcttttgatctcaaaaattttaaaactggaagaacaggaagtgtccaccccctgggactggtcccatttttttggagctgggctgcttctggcccacgaaggtgaaggggcctgcctggtgacgtggtggatggtaagcctgaagaagcagggagcccagaggttttggggtaaggctttgcagtcagactgggtttgagtcctggctctgccactggatggactggtgttcgggggcaagttagtcaacctgtctgagtcttagagccctccttacatgaggatgagagttctggcatctcaaggtatgaaggtcaagtcccctggtcagcgcagaacagtgttggtgggaggtgacaatatgtgagtggtagctgttatgattgtgactttattgagctaacttgacacccagggagatgtgtctggtctgtctgtggcctcgtgcatcccctgctccctgccatgtgctccaggaagttgacatgacccactcctttcctaagcagccctaaatatgagaatcttcttcccttccaaggtcagaggagcaccagcctatggccctggacccctggggtattcagcgagttcctggaggacggtgggatggggctgtggttccagcaaggtcagtcactccgcagcagcatccactctgtgcctggcatttggcagtgcacagaggaaaagggttagaagatggatgggaacatgctccctccttgcccacccatgtgtcaagaactagacttgtaagccttaagcctggtcccattgaccacttgctgtgtgactctggacccaatggccatgcctctctgtgccttttctccctgtctgtgacctcaaggccagtatctactcttgggaattctctgcctctgaaaacccttttgtaggggtctcaagatgccttccaaaggcagggctggtggcttctatgtagaaatagaggtgcatgcctgtgagaccatcaaggggtgtgatgagctctggcccccaacacacgtagtccttatttcttgtatgaattcaatcaatagttattgaacaccttctgtgtgcccggcgctgtgctgggcaccagggacacgcagctacacaatcacatggtgtctgcctgtgtgtgcttcctggctggctgtccctcctcagggcaagcaatgttcccaaagggaaaggccttccttgggaaggtgtaagggagactggcctggggtgggccagcctgctgggactcaggatgggggaggtagagggaaacacaaaggctggtcttggcgaggaagggcctttgtccttagggtcccagggaggccttggaggcattttcaggcagaagtggcaccggtgggtcagctgtgagtgagtgtggatgggaggaggtgaaccccatggtgagagggactggacctgcgtgtgtgggggtcgggtgcaatgagggatatgtgtgtacagggtgggtggcgtggccaggcctcagtgatggtgctgtgcagggctggggcgagctgatgtacgtgactgttggctacagggaaacctgtctggattctgtaggttgttttatcaaggcagaccttcaaccactggtcttgcagcctctgctcccactcctctagtgacaggaaactcagtcctttcccaggcaaccctgaaaatgagaaccttcttcccctccaagggcagagtagaaagaggccgggagtcagaggacctggtttgagatgctgtcaggactgccctgtcatttggcagctgccctcccttctctggacctcaaattcctcatctgtaaagtggacacagcagtatcccaggcccctgaggctgttgtgcagggtcggtgagatgatgtggccttagctctttgtgcttagggagcatcggctcctggttcatccactgttaccgttctatgtggttcacataggacattggccaagggaggccctcctcttgcagatcagaagtgccgggtgtgggtcagggtgctgggtagagggtccacgtgcaggggtgggggcccagggagtaactgggcatccaggaggggaggaagaatgaactgtggtttgcaaagtgcagaccccactttcccacctgcccatctgtggccaagccaactgcagctgctgtccatctttcccatgccccatgctgagcagaactatttgtgtccagccgaatttgtgaagcttagcaccttctagaagaggagtcccttgggaagaagctgcccacccactcgtgctccagtcacctctgatttattccacctgccaggaaccactggtgggtgcgggctaggaggcaggctccccaggatgggtgcctggaggcctctgacaagcccttccttttctctgtgcctcctcctcactttgcctatctgtgcaacgggcatgcacttccagctgtgaccccttaggaacctgtgggccttaggctgcactgaaggcacagagcaggtgcagcacctccacattgcaggaggccatcttgccgttgaaggaagagcttgctctgaaagctgtcctgttcctggcctgagctgggaactggggacaaagcagtgacatgagccctgatctcatggaactcatgccagccaagaaggttccatcaagctggatgtgctgtggctcatgttacaaagcccgtggatctttgtttcccagagtgtatgttggtttcagcactcagtcggcccatctcaagaggcagcgtgtctggctttgacctggtggcagtatgcttctgtcactgaaagctgtgtggccttcggcacacagctctcctccttggaggtccagttgtcgctaagatgggattggtgctccctgcctttgggctgggtgaaggttctgggaggtgcactgcgcagttcctggcctgtgcagggtgctcagtaaatggcaattgcgttttagctgaattcttagggaagctgtgtgtcctttgcccggcctgtcagagatttaaggggtgattcaggcatctagaggaggagggagctgacaattgcacttctgttttgctttttgtttttgctttttttgagagcagtattctctgggaggcgaagggtagaaaagagagctgagtttgagctttggggtgggcaggcctgatgggctggggaaggtgtgtgcctctcaccctaccacacctcccctagccctgccttgatttttgaggtgctgatgagaagtgtctgcttttctttttcaggcccagacccttcctcgtcctagttctggaggaccccatgagctcctctaaccaatcccctcctttttctcatgccccagtaaactgaggcccaggaagatgatgggacatgcctatgctctcaggggcaccagagcttggctggaacccagggccttgaccccagcatgaagcttttccctctccgacttcgtactcccaccccccgcacccgtgcagggccccagacggcaagggatggtgagggaaggaatgattgggccgggtggggctgcagaacttataattatgaaaactgggtaaacaaacaagctctctgggagagaagcaagccctgtgcgggcctcacagatgggcctgtgtccgaggagacagcccaggcccgtctatgcgcagacagtgaggggctgtgttggacttaaaaagccaaagccacactcccctcccacccccactcctatatttcaggctgccaggaaaagaggagggggaaggggcagccctttcttccaaggaggtaggggctgaccccctaggactctcctggggtcagccctcctggcccagcttgggacagtcacagctcactgtgtgaccttggtcaaggggcgtctctcctctgggcctcagttccccatctctagagtggaggtcaccccatctctcaaggagggtggcaggatggggaaagatttgagccaactggttgaatacactgagccctttcactcaccctgacccgaggccaactgggatctcagaaactcttcatttctctctggccagaggcaggggcccctcttggagcagaggagtgactttctcagtgacctgagagccggcctggtcctgggaggccaaacctccaatcctggcctgactttagcaggctgcccagctcagctttcctgtcttcctgctgagattgtggcagaatccgagaggagctgtttctggtgcctgccctgcaggctgggggctgggcagcttgccctgcctggaggcccccgggtggagcctggcagacttcctgtgcaattggggctgagcccccgccctccctcccctcttcctgcagtcccctgtgtggcttctgggagtccagctctgtagatgggaggccggtcctgcttcagacctctgtggccttgggtgaactcctgcctctcctccaagcctcagtttcccccatggttcaatggaggggttggataagagcctctggtagtagagtgaccttgctactaaccatgtgtcaccctccttcagactgacccttccaggctgtcctgtgccctcgaggtcaagcccagaccctgaaatgccctcacagaccaagccctgcagccagtagccccactcctggtaggctggatcaggctcttcctctgagctcccacagccccttggccacccgtgtgtacctgtagcccttctcacatggttgtgattcatttttgtttttgagacagggtcttgcactgttgcccaggctggagtgcagtattgcaattatagcttactgcagcctcaacctcccgggctccggcaatccttctgcctcagtctccccagtagctgggaccccaggtgtgcaccaccacatggggctaatttatttttatattttgtataggcagagtctccctgtgttacccaggctggtctcaaactcctgagctaagccatcctcctgcctggcctcccaaagtgctgggattacaggtgtttgagccaccacgcccagcccgtggttgtgattctaattcccatctgtgatatgagtacctgcgggctaactcaccatgggctcccctgaggtggacaggtggcctcacagctcagacttgctccaccagcagctgaacaagtaccctaggtcaggctttatgccttagtttcattggctgtaaaatgggcatgatgatgcttctactccactggattgtaaaggttattaaattatgtgtgtaaagcacaagaaatgctgaggagtcaataactgtaatgaacatttattagtgcaaattgttttagttccctagcaggaatgaatgaatgaatgaatgaatgaatgaatgaatgccattgcaaggtcctacatcctgggagcatggggatcccaaagctctctggatgaaggtcctggtaggtgcagaatgtgtgtgtgtgtggttggtgggggttggttacagaggggcagggcagatgtgggaggggcttggggtggtgacgtaccccctgcccttgtggaaggagtggtttgggcccctccgtgtctcagacccgcaggcacgaagccatgtggccatccacaacttccttcctcctgcctgtattcctcgaagcgtgactcactggctttgagcccttcattcttgtccttgagccccgagggtgaggcgggtagagtctttcttggaagggcggctctctctctgggttcctgtctattcctggcccttctgcagcttctgagcatgacaggcagggatggaggggtgcgggtagggtggggtggacacctgggccctggtcctggtggccccactgaccccatgtgtgtcaggcttggggtgggcacccactgagggcccacccagggcttggatctgagctggtgtggctgaaacagcccagtcaagctcacctgggccctgcccctgtagagctcctgtctggtcaggagacacacagaacaactaccactcagtcattaattaaaatcattaccggagggcgaattgctataaagaaatggccactcttccctgggagctcacgtgtcctgggatctccccagcagtgcctgtggtttgctctcctgtcacagaggaggaaacacagcccactgagtgggaaagggagcaggctcagctctggggcaagtcctgtgcccacctggggcctcaggatctcgtcacccatcttagaggtgtgctgttcacgtgaccctcctgccttggcctcccaaagtgctgggattacagacgtgagctgccgctccccactagggaatgctgttcaggaggcccagggtccgccgctggccccccatggttctgggtgggcgggctggcttcggggttttagcctggggactgtggaactgcagcgagagctgggtttgttgtctttaaatccctcctttgtgtgtccctagacagaaaccactgtgactaaagtattgggatcttctaaaggctaggcaggaaatgggggctggtaagggtggtcgtcccccttcccactccctccaccaatacacaggacagcagaaaggtggcccaaagccctgggagaaacccaccccaacatttcacatctagaatgtaccgcgttaggtaacaaaatggttacattacagcatgggggatggaatggaaacaatgtattaacaggcattgttcaatggcataatatgaagccattaaaagtgatgattcagttttgtatgtctgaaagtgtgtatgtttgtataggcatagaacaaaataaggaaagaaattcaccaaaatataaatagaggttattttggagtggtgggataatggattattttaatttttttattctctcctgatttttgttttttgttttttgtttttttacagtgagtggattaaatcaaaaagaataacctgggtgggtgcagtggttcaggcctgtaatcccagcattttggtggctcacgcctgtaatcccagcactttgggaggctgaggtgggcagatcacctgaggtcaggagtttgagaccagcctggccaacatggtgaaacccccaccccccgtctctactaaaaatacaaaaattagccgggcatggggttgcacacctgtggtcccagctactcgagaggctgaggcaggaggattgctttaacttgggaggctgagattgcagtgagccaagatcgtgccatagcactccagcctgggtgacagagcaagaccctgtctcaaaaagcaaaaaaaaaaaaaaaaaaaaaaagaaaaagaaaaagaaaagaataaccctattgactgtatttagtggaacaatttgattcctgtctgacttcagaatctaagccattctggcccgactggagccccaagggggttgcaagcacagggcaggctccggagcggggaagagggaagagaaaattctggaagaggggtgtttgagctcaatcttggaggacaggagggatttttaaccagcagacttggggtaagggtgagtggagggcatggcctggcatagacccttgcttatccaaggcagggagctgagcacagccttgagtgccaggcaaaggggttggggaatggagagtccttcccatgaacacttgttagctggactttagaatgaggactcagtttctgtgatgagggcaaggagagcaacaaatttgtgttaggtaggctctgtctgtgtgcccagcctctgagcccccagtggctgtgagcagataggactgtggtagtttagcccagagatggcagatggattccacaaataaagagtctctctccgtgatgagtgctgaaggccgggcgtgggtgggggcattggggtggtgaggagtggttgggtaccatccaactgggaaagcctatgacccatcagacctccagtccggaggtgtccctgctaagtaaaaaaaaattagccaggcatggtggcacaagcctatagtcccagctactctggaggctgaggtgggaggattgcttgagcccaggaggttgaggctgcaattagctggatcatgctacggctctccagcctgggcaactgagcaagatagggctccaggccagacagagctccaggtccccagggtaatatgcacaggatgctggtacctggcatagaacttgggtggccagaagcatgcgctgcacgaggctgagcacgaagaccccattctgctgtgtttagggcttcccttccgcctgtctccatgatgacctcagctctctgctttcccttacccatctgtagcacagggatggttgcagctaccttcaagagggttgttgtgagcttcatgccagggccacccctggtacctggcacacagcaaatactcaggaagagtttccgtcctcggggttcagtccccagccagggaactccttccctcctggaggagcctcagcagcctgaacttgatggccaggatggtattatatcaggttgcttggcggtgagctctggcctccccctcagacccactgtggctcccacctggcagcatctgccaaaggtcaggttctcacagctctggaggtttggcctttcaactttgagcttccccagtcttccccctttattgtttttcaccttttattattattgttacataagcaatagctagtggtcaaagaaaattagaaaataacagataagtaataggaagaaaatgaaaatcaccgataatcctaccacccagaaaagactttcaggcaccttcctgatacataatttgttcttctaccttaatagtgagtagtgggcctcctccttgtgaatggatacagaatattccattatggctgagcaaggaggctaatgcctgtaatcccagcattttgggaggctgagacaggcggatcacctgaggtccggagttggagaccagcctggccaacatagtgaaaccctgtctctacttaaaatacaaaaattagccaggcgtggtggtggtggacacctgtaatctcagctacttgggaggctgatgcaggagaattgcttgaacccaggaggcagaggttgcagtgagctgagatcacaccactatactccagcctgggtgacagagcaagactctgtctcaaaaaaaaaaaaaaaaaaaaaacgaatattccattacgcctcaatagtctatattttaacttactcagtcaaagccctattgccaggcagttaggctttttctatttttcttttttgtttgtttgtttttgagatggcatcttgctctgttgcccaggcttgagggcagtgtcaccatcatggccaattgcagcctcaatctcctgggctcaagcaatcctcccacctcaacctcccaagtagctgggactacaggcttgtgccaccatgcctggctaattttttaaaaaaattttcgtagagatggattctcactttgtcatccagactggtctgaaactcctggccttaagtgatcctcctgcctcagcctcccaaagtgctgcgattacaggcatgagccatggtgtccggctctattttttgttgttgtaaacagtgctgtgttggaaagcttaaatcaattaatgggattgagccattgattccgcatggtttgagagccatctctgctcagtgtcaggctgtgtgctgggactgggggtgctgggtggggaggcggccatggtcctcaacctcttggggacccctgtctggggaagacaggcccagcatggcacgccagcagaggtgggggtttagggcatctttgggagccagggagcagccataacccagacctggagagtcatgggaggcccagctgaggacacctgcagctggtgacctgagggtggggcaagccctgcacctgctgctggctgagctcatgggaggggacctctcaggtgagccacaaaggatacaggaggagagagtttcaggcagagggcaggtctgcagaggcccagagtagacagagcatgggcattgagggaaccaaaacttcccagagatcggtgctgtggttcttgccagcctggcagcagctcccatgtgcatgacactgtggtagttcttttctttttctttctttctttcttttttttttaagatggagttttgctcttgttgcccaggctggagtgcagtgacgtgatctcagctcactgcaacctccgcctcctgggttctagcaattctcctgcctcagcctcccaagtagctgagactacaggcatgtgcaccacgcctggctaattttgtatttatttatttatttatatttttatttatttatttttgagacagagtctcgctctgttgcccaggctggagtgcagtggcgcaatctctactcactgcaacctctgcctcttgggttcaagcgattctcgtgcctcagcctcccaagtagctgggattacaggtgcccaccactgtacccagctaatttttgtgtttttagtagagacggggtttcaccgtgttgcccaggccggtcttgaactcctgatctcaggtgatctgcccatctcagcctcccaaagtgctgggattacaggtgtgagccacagcaccctgccaattttgtatttttagtagagacggggtttcactatgttggccaggctggtctcgaactcctgacctcaggtgatccacccaccttggcctcctaaagtgttgggattacagacatgagccaccgcacctagccggtagttttttttcaaagtgccgttccatctgtccctttgtgcggtggggatcactggcttcccttttcttaatgggaacacagaagcagagtgacgtgcgtgccccagggaagtggctggcggacccaggcctttcaccggcccagcacacgggacagggggttgaagtgcaggatccgccagctctggtttcccggctctttgcaggtgctggatcacttgacaggatccaagcaggaagaggacgcggaggatctgagcttaggtgaccgccttagtttccatgaggaggtagtgaccttttctgctgctgatatgtgaccttggcctggcccagccccaaacccagccctatatttgcaggaagggtcctgcctcttgggccatactgggattggagaggccctggtttatatggaccttgggggctgggaagtgtctgtccccaagctggagttaacctttctgggaatatgccatcctcctctggtgtcttaacatgactgggagactgaactgcagagctctggtctaatgtcacatagtcaggggataaatatttctgtgcaaagtgctgtgctagatgctgggcatatgttatgagtgagacagacagggtccctgccctcctagggcaaatggagatggaacaatgaattattaaagcaaagttgtgctaatgactaacaggggtctgacctgtgtgagcgagctggcaacagtcagggacagtgcttttcagcaccctaggctggcagttaggactcaggtcagttctatcaaggcttaatggtgggctcctctgggcttcccaatgtgtcaggaaggagcgttgtctcatgtcccaggtggagggcatcagggcgttgagggtccagcaccatggtgtccagtcccttcacggtacggggaggagacagggagccaggaagggtggggggcttgtccagggtcactcagcagcagtcaggtacatggatttggggcccagtgctcttagccctgtatcaccaccccatttcactggccagtgatggggagacactgaggcggtccccactcaccctcaagggactcccccggggaagcagaccaagaccacagaggctgttggctgcgcagggtctctcagggcgcacaaatggggtcacgcaggcacctgggacagagagtgggaggctggcggggctgggaggggagccgttctcccacctccccttctggccccctctggagcctgaggacacctgcagctggtgacctgagggtggggcaagccctgcacctgctgctcgctgagcttagagtacagaccaagggagtcttgttatttgaataaactttccttctatccatgtaaagggtccctggcattccaatctgggattgggtttcctctggcccagcagcaagcacacgagtggattttcatattggctcatctttcttgttctcttcttccccttctttccctccctggctttgagaaggcagaatcgcccctccccagtcccactcactgagaggaccctgcaagccagaagctgcaggcagcagcatgcatgtgtgtgcacatgtgtaagtgtgcgtatgtgtgtgagtggatgcacggtgtgtgagtgtacatgtgtgtgggcatgcacatgtgtgaatgtgcgtgtgtgtgcctgcacatgtgagtgcatgcgtgtgggcgtgcatgtgagtgtgtgtgcgtgcatgtgcatgcacatgtgagtgcatgtgtgtggcatgcatgtgagtgtgagtgtgcatgcgtgtgggcatacacgtgtgtgtgaatggtgggtgagcaggggtcacgaggcaacttgggaagaacctgacttgggcttagggaaaggatattagcagtagagggtgcttggctgatgagatctgtggggtttgtgtatccgagtttagtccttttccattggggttgggccatggtgactggcacttattagctgttagttcttattggaacagaagctggcatttattgggctcttcctgggagtcaggcagggtgacaggtgcatctcacacatcttatttagtcctcacaccaactcttggaggtgggtgctctttgaccctccagcctctgcttacacacctccagtgatgaggccttccctacccgccagggtcccttatcctgggcatctgaggccgttagaaagcccttgctgggatcttgtgtgtcttctgtggatgacttgagaatgggctctgcttggcaatagggcgtggctacggctggacttccccagcgtctgttttccagggaactgtccaactctaaggtttggggagaggaacaagtcctccctcctttccctgagcagcccctatgtggtacttagcccgtcacagcttcattcatcacataccaagcaagtctgaagcttaatgttgaaaccctagaggtattttcattagcatcgatctggatgtcttagtcaatgcaataagagaagagagaaaaaaagagaagtacaaatgcaagacagcgggaaagccctcatggagttcagggactggtgacaacaaagcactgttggtctttggacttctccaccccctaaggctgcctacaggaagcagagtcttggagagaccagaacttgcccagggccacacgtgagttggcggcagagctggacgaggactcagggcccttgattttcccaaccagcatctctggtgatggatgcagcagctaagggagaggcggcaaggccagagtgttctccatgccagtgtcacagagcaggggggctgtggtcggtcgaggttctcaggggtgcggtacgtttgggtgttggctttcagaagtcttcattgatgtttcttgctccacttctccttcctgatgaattaacctgagagatgagggtccagaaagattggaccccaagcatgtcaccttttaatctcatgacccaccagctgagggaccagggaggtgctgttccagtcaccctttgctggttcccattgcgtggcgtgaaacatgggacagagaactgccatgagcactgatgagagatgccactgggcaccctgaccatttatgtcctggccaccaatactgggacagatggagctccttcgagaggttccatcactgccattgataacaccagcccacatttgcccaggctctgtgggtttattcatttcattgaatccttatgacaccttgcaagatgggggatcgtaaagttgctgggttttttttgtttgtttttttgtttttgaggtggagtttcgctcttgttgcccaggctggagtgcaatggtgcgatctctgctcactgcaacctccacctctagggttcaagcgattctcctgcctcagcctcctgagtagctaggattacaggcatgcgccaccacacctggctacttttgtatatttagtagaggcagggtttctccatgttggtcaggttggtctcgaactcccgacctcagatgatctgcccaccttggcctcccaaagtgctgggattacaggcgtgagccaccgtgcccggtggtgctgttttttgttgttgttgttgttgttgtgttttttgagatggagtctcgctctgtagcccaggctggagtgcagtggcgcgatctcagctcactgcaacctccacttcctaggttcaagcgattctcctgcctcaaccttccgagcagttgggattataggcatgcgccaccatgcctagctaatttttgtatttttagtagagacggtgtttcaccatgttggccaggctggtctcaaactcctgaccttaggtgacctcccaaagtgctgggattataggcgtgagccaccgcacctggccaggttgctgttactcccatgttacagctgaggaaacagaggttcagagagaattgagccatgtgttgctgaaagtcctatagccagcaaagggtggagttaggatttgaactgagatctggttccaggaccttgacactgcactgttgaagggtccttcttgacctaggacgtgctgataaatctttgtggaatggattaactctttcatgcctgtccgaatcttggcctttctcgggtcttctgcttggcacacactcccttcccggtgtcctccctcccctagcagggactctttgtgtctcagctgctacctccctctgggaggcttccgtgaccctgcaggcttggtcagtcaccttcctgggctcctgtgacctcctgtgcttctcccagttggggctcctagtaattgtagtttttgttgacaatctgcctccctcattagggtactctctcctgagtacccagtggccaggattgctgaatgaatgagtgagagcaacataaaccctttcttggccatcgtgatgaagcctcagagcctcgcctgaacttggtgactcgcctgacatctgccattttggcttggcccgcgctggctgatggaggacatgggatctgggctgggtcctgtcctcagccctgccccagtggttgtgacctgtctgatggggcggggctgagtggttgacactgcggacatcttgggggaagggcttgaccacaggctcttcctgcatatctcaaggtccaacaccaggctggacgctgaggggaacattggtggtgggttctcaggcccagggcaggtgtccaggcccgtggggggcacctgccaatgtgcacgagccacagcagagcaccctgggttcccagtccagcctcggccctggacgtgactgagagaaggggtatgaggagcacctgtggacaggcgtggggatgctcctctggggcctgggcagttttgacaggtggctggctaaggctcaggctcctgtgggggtggtgaggatgacaagaaaggaatgaaggccagagacattgtggagaaaaagtcaacaggaaagggtgactccatgtgagaggaaaggagggtcgtgtctacacaatcactgtcatagatcagcctcctccttgggcgtggccttggccagggggccgcaggatggcagccttgggtgcccaccccctggagtgtgggtcctgctctgggtggtgacgctgctgggggcctcggcaccccctgggctgccctcccagcgaggatctgtgttcccagacggcaggcatgcctcatcctgggctcccagaacaagctgccactgtgggctgtgggctggggccgctgccaggcaggcggggtggggggcaggaggggatgagagggcttttgtttccttctgtttgtgtcaagatgggaatggacttcctcccaccaggcggcctcgaggtgtaaaggaaagggcagccccagtgggcgggttttgggtcacccgtttttttgggtgcatttctctgggctcccgcctcagccccgccctctcctcccagccctcctgcctcaaagctcacccttccccaccagacctgttgtggcccagccctggttaaatatttgccaaccgagaagagttttcaaggcagccttgtgaaaaaccccagctgactcctggctctgttgggcctgacctgcctctgtgatgagacccagacggcctgtgccctcagactgagtccctgcccaccatggcctccctggtgacctgtttggcgcctgaggctgggtgacctaacacttgttcggcacttgtttatcaagcacccccctgggcctggcgggagctgggtgctggggagacagcggagagcagtctcagtccggggagcgtctcagatgaggcattaactgtggttgaggggagtgccggggagcaggccaggggctgtgggagtggaggccagggaggctgtggagacctgggaggccgggacttgtctggagggagggttccgaggaggtggcacttgagcctggggaggagaaagaggagttggccaggcacaaggggtggacgctaggagggcactgtagacgtgggaccccaaggccagaggccagatttcctccgctgaggaggaagctgaggggctgaggttgcggttcgcttgggttcgctgggtgtgaaagccccattcacctgtttctccccaagatggtctcagaggagctgggacactaacagggcaatgggaccctgggcagcttttccccatttccccagcctcagtttccccatctgtccaaaagatagtttggacttgatcttggaggtcccttcccaggtccagtggcctcttaggagtatgtggctggcccatgaatgagggaatgtgccatggcagggattctaccagcaccaaaggccaagataacagccatggccgggtgcggtggctcatgcctgtaatcctagcacttcgggaggccgaggcgggtggatcacctgaggtcaggaattcgagaccagcctgaccaacgtggtgaaaccccgtctctactaaaaatacaaaaatcagctgggtgtggtggcacatgcctgtaatcccagctgcttgggaggctgaggcaggagaattgtttgaacctgggaggcggagattgcagcgagctgagatcatgccactgcactccagcctgggcaacagagtggggactccatctcaaaaaaaaaattaattaattaattaaaaaaataaaagaaaaaaagaataacagccatgtgcccttatagggttcatgcagccctatcctggtgttagcaacaaaagccaacatctcctgagtgctccctgccctagcaaccttgtgaggtggtggtggaggactatgacattatacccattttacagataaggaaactgaggcccagagaggctgttctgagctcagggtttgcttcttgttttaagcatggctccagaaatacccgtctctgtgagaaacccaccctcctctcccaaggccagcgccatgttaggtaccagggatacggaagtgaacaagataccattccaacctgggaagctgccagtcgagcaaggaatgtcccagcagagagtcagcaaatggttctagctcttctctcttccagcacagtttgagcagcgaacagaagcaggcttgccttcacatcccagttttgctcttccctgtgtagtatcgggaaagtcacttaacttctcaggagcctcagatcccttatccataaagtgggtttggcagtacgtcccagtgagggttaaatgaaacaatgttgactataatttttagcatatatgggatctgcctctgtgcctggcacagaactaactgttacatgcattagctcatgttgcaattatgattataattttctgcaagtggggaactgaagaacagtgtgatggaggagaggatgggtgagcagggccttgaaagtctggctaagattgtgaactgtggaattgaagggaagggcggtccagccagaggacacaacatggatgaagatgtggaggtaggaaatgtgtaatggaggcgagagacgcccagggtgtggggatgggaaggagagcggggctgaggttgcggatcttggatgtgattctgtgtaacatgcttgtgggcttcagtgtgccaggcctgtggtgacaagttagtccatagtctcttggggccatcagagcccagagagatcctttacaaagtgcttcatgcaaccatcttccagatgtttccacagcccgtggagtctaggttcagccagcctgggctcacaccccagcttggattttggctccctgcttgacagccggctgacctgggacaaggccctggaccttccagcctctgtcttgatcgggggtgattcctgtaccacttcctgcagctgttgtccgggtctatgtcagatggcgtgaggtgtccccagccagcgtgacacccattagcttcggggtaggagggctccctaactgttctgtgcctttttgttcctggtgtggagacagagcctttctccctgggccattttgagagtcgagaatgatctcgcactggaagtccctagctgagggctggctcacgcagggtcacacggctgtcattgtcgggccttggcgtgctgagggatgctgtctttaagggaagaggtttttccttgttaataactggccttggggccaggcacagtggctcacgcctgtaaccccagcactttgggaggctgaggcgggtggatcacctgaggtcaggagttcgaggccagcctggccaacatggtgaaacccccatctctactaaaaatacaaaaaattagccaggtgtgatggtgggtgcctgtaatcccagctactggggaggctgaggcagaagaattgcttgaatctgggaggcagaggttgcagtgagccaagatcgtgccactgcactccagcctgggcaacagagccagactccgtctcaaaacaaaacaaaacaaaactggcctcagggaagagtgacgcagccaagggccccttcagggcacctgaggccagcagggggggaaatgtcggtggcagccaccttcccaaggaaggacagcacagtgtacatttcctcatccccaggacccagccaagggcctgctccgatgtcagcctccgtttccgtggtgaggaatctccggggtgtgtgggggcttattgctcagtggcttcgtggctctcttttgggggtgggtctggcctgagattggcacttctggcctgttgctgtgggcttcccttccttttccactgcgtgccaggccctgccccaggagcaggggtgctgcctgtgggagccacatgaggaacagacctttacccaccaggaggccagcggtgggctgcgggaataggtggagggctcccacccagcctggggctttccagttgaaagacgcatggtggtgggctgaggagtgagcttggcggaagactgtattccggacatggggagcagcctctgcgagaccccagatgacttgggcctgcgggcatggtaaggagctcagttccatcccagaggcagtaggagctgtaccactggaaggtttctgagccaggaaacgttgggcaactcccctgtggcccctgtgtgtgggaaggatcagaggcagccaggatggagtaggcaggacttcagtggctgcggcgggcacaggacgggagtggcctggctggggggcagtgactagaggcacaggctgggtggccacttgactggcccctgggtgctggggagcctgcctcaccctgttgggcttgtgctagggggcaggtagtggtggggtgggaatcccataggccctgtttctctcaggcccagaaggggggtcccaggggtctgctgttgtaccccttctgccaaggatggctcatggagggaccctgaatccgtcccttgccttctctggtatggtccctcttctggacaggaattgattgggtgggggacactcagctgtcctcctccttcctggcctgccagattctggctgctggctcaggctcttctcgtggatgggctgctggtccccctcctgctacttgatggagcctgtcattacccctcccacccccaacttcccacctgattacaggtcctgagcaggagccctgtgtctgcccttcccgtggaggccacccacaggctggtgctgcggaggccagggtgagatggttttgcccaaacgttggttccctgttcagagttcatgtcatttacaagctgtgtgtccctggagaagtcccttaacctctctgagcctcagtgttctctgggaagtgaggacagtgcgtgaaataatgagtgtgcatgtgcagtgccgtgctgggcacagaggtggtgctgacaagtggctgctgctattgtgtgtcgattgtgacagtaggtggggggcaagtagaaagtagaaaggccctgagcgaggcactggtctatgccaacccagctctgttggatgtgctgtgtggccctaggagagtgtcaccacctttctggaccccaagctctccctgctgtctcaggcacatgatggagatggtggtgcttgggacaactctgagacctgcgagaatggagtccctgccccgactctgcctctgctggtccctggactgtagggtgggtggggtcggcacccccctctttcccccacctccccatgctggacctgctccctatgccctgggaaccaggcgggcaggttctgagcctgccccaccctacagggtgctgctacctgcctggtttcagtcggcaaacctctcagccctgaaaccctgaaaccgggctgggcctcgtgggtgaggtgtgtccctggagcccactggagagaccggatgagccaggaacgggtctggcacagcgccctccactggggccaaaccagggctggcgccggcgtgcagcccccatggtggacatgagctggatgtggtcgcagctggagatgactctcttcctcttgggtcccccgtccgtgtggaacagggtttcaggcttaggcatcaggtcgggaccagggtgcagatcctacctctgcctcttctcagcagagtgatttggcagaggtacccagttctcggtcacctggtctgaaatgttctgccagtaccaataccacctggcccgaggttgagttgaagaatcgggggcacgtgtccaagcaaaatgcttagcacaggagcggcacatggtggctttggggagcgtcatgacaaggcaaagaaggaactccttagcttggcattcgaggccctccgggatacgcctttttaggtccattttctgagaacccctggactccttcctccattctcagctcagcaagcctcctctcctctctgagcctcagttcccctatctgcacagtgggcctggtaccccatcccccagctccccaagcctccaggccaccctggggcctccccagttcttgcccagcctcactatctgcacaggaagtagcgtggcccttaacgttgtcagtttggaaaatcagagattaattaacgttccggccgccttggctgctgttggagctggtcccagggtgggccaggctgcatgctcagcctctgtttcaagggcctcactgtgggttagaggaaccttgacaagaggcacttcttaggagcccccattggtgaagtgcccccttcttgccagggtaaagggcttcatgctcagtagcccgtttgtctcataacccattcaggcagatactgttgtgccattttgcagaggggaaaataaaggctcagagaggagaagtgccttagccaaggccacacagctcataggtggcagagctgggacttggacccagagcctgtgtgtccatgtagaaatggtgccctgtttgcaggtgatggggggtgcctagttctccccccgggtccttttgtctggcccgagggggctgtgatcagctgctggtcagagctgactcaccagcagctcacaggaggggctgaggccagcatcccggtcagttcctggggccagggcagcactgattagattgtcgttgagattttcggtcagctgagctgacagggacccaccctcccattttaaaggtgggaaaattagggcccagtgaggatgaagaagtaaggctccagtgggtcggatgattctccaccagctccgacccgacaggggccagtggagctggaaaccctagacctcagtcccggctctgacacctgccagctgttgcctcgggaaagtcactttgccctctgagcctcggtttcctcgtctgtaagatgaggatagtaaagccttgtgttgcctcattcttgggattgggcaagaccccagcaagagagtggaaaaccaggggtttgaaagcggcattgcgggtcctcgtgaggggtcactgggatgagaggctttgcggggtagggctctgtgcaggctttggtgggagacaaggtccaaaacccacctctttcccctccgttgtgtgtctttgagtgagtcagtgagtctctctgagcctcacttttcttcctttctttttttttgactgacccaaattagatctttattgtatttttccacatatctatcattcccaaaagatcagtcagctcgatccttaatttttcttactatgagatgtccctaatacacagtctttgtataaattatccattttaagtatatagtgaattccagatgtgatcacaactgcatttctttctttttttttttttttttgagatggagtctcactgtgtctcccaggctagagtacgatggcgcaatctcagctcactgcagcctccatctcccaggttcaagcaattatcctgcctcagtctcccaagtagctgggattacaggcgcccaccaccatgcctggctaatttttgtatttttggtagagatggggtttcaccatgttggccaggctggtctcaaactcctgacctcaagtgatctgcctgcctcggcctcccaaagtgctgggattacaggcgtgagccactgtgcccggccgcacaactgcatttctttttttttttttttttctttgagatggagtctcactgtgtctcccaggttggaatgcagtggcgcgatcttggctcacagcaacctctgcctctcagattgaagtgattctcctgcctcagcctcctgagtagctgggattgcaggcacgcatcaccatgcctggccacacaactgcgtttctaaatagccatgtgacactcactgagtgcttcctgggtggcagccgctgtgtttagcctgagtctcacttttcttatctgtcagatgggatactaatacctgttaggattaaacaggctgtggagcatgcagtaagttgtcggtggataggcacctatccctggcaaactctggggatccaggggcagagttaggaggactggcttgtgagggggtccttctcagtcaccctcaataacccgataggatgcagcccttggagacagggttccagtcatatggggagcagagcccccctgagatccacagagcacccccttattcaaccaacttgctgaaagggttggctctcagctccacaacaaacccacaagtgtgtgttgtgagttttgccctggacctgcatccccaaaagtggcctcttcagaggtggatgcagcccagtacccatagagacaccaggtggagacagaggcctgggatgggagtggcttcctgaggtccctgggcacagatcaggactcaactccactcccagaattcacacactgccctcttgggctaagaagggaaccgggaccccaacaggcaggcgccttttgtgacaacctctgtgaggggcctcggcaggttttgtggactgacagagtggcctttcctgagctgtttaattgttctgagcctcggttcatacagctgtaaagtgagggttgtatttccctctgggccatttgaagaatggtgtgtgttggggcaaagaacaggtgggccctgtgtctgatgggcgtgggcttacctcctgctggcagaaagcgaaaagggggcaaccaacggctctgggcgccagcagaggctaagggttatgccaggggatcccagccacggttaggcaggaccccccatcaaacgcagggacctgctgtcccccttggcttccccgcatctgtgatctttgtttgtggaaggcctcccatcattatcattattattttgtgattcttgtcccggttcttcagaaaacaaatctttattggattatttcaaactataaaagttatactgctaataaacatttcaaacagtctcttatgactgctgttctcagctgaggacactgatgattaacagtgacgtttatggaggcctggagctgagcacctcaaacgctatccggtcctgcagagctcagagctcgggaacagcttcggagaggcccatttacaaatgaagaatgtgagtctctgagagctaggcgcttgcagggctggcatatggcagggcggggactctggtcctgacttcaagctcctcaccaggaggctgggcacctggggccgcagggcaggctctgtgagtcctgccccactccattccctgccttctcacctagcagcacctggggcagagtcaatgcagggaggcagaatggatgagataatgtggaaagtgacgaagctggcacacaccttcacaccaccccaccccagcctctctgtagctcacagaagcgagtgatttctaccaccagctggagccccccagttcctgggcccaggacctgcgggccagccctgcctctgtagatgggggcacagccagtttcctctctgccctctaaggggaggtagggggcctgtggggccctgtagacaatggccagagctaggaccaggagggtggcatgcagccgactatggctcgaacctaattgcctccatctggctgtgtgacctcagctgagctgctcaccctctctggctcacattcccctaacagggtggtaagcctgagtgttggaggccctgtccaacatctgccccaaatccgtggcgtgtggtgtctccagaggctgcggcaggaaatggaaagagctgctgtgggcaagtatggaggaaagaggggtgcccgggctcaggacccccacagacacccaggccgggacgccatgtgggaatttgagttgtaaaatcctgaagcaacaatgccgggggagagccactgcagggagcaagaaggaaaagtggggtactgggtggggcctgcctggactgcagccccagagctcagcaggtaaggcggtggccaggctgggtcctctggctgagcccccaccagggctgcagtgctcgcctgggtcctcttccagcagggtccagccaggaaggccctgcaagccctttgtccaggctggccccctcccaatgctgctggccttttgggtccctctggcctccacacctggggtccccagcacccgagtcctcatcttctgcgtctctgggttacttcctctgtacaaagcacgtggcggttccttccatgctggctgaggacatctctcaagaatgtgctcggggctacccctgccaaggagccatccgtggccctgtttcccatggtcctccctttctagctctcccgtggtcgccacccttcttctgagcggagctggcttcccggtgctgcctgggctccgtccttaaggtccttaaccccttgctaatgctgtccccctacctgcagcatggcgctccctcagtaccccctccgatgcctgccccacggccttcccttgtttggacttagtaactatttggctgctggaccaaacccccactattcctccccttgccgacatctgcttgtgccaggcctggtgcccaggatccagtggtgagcaaaaggagaccagacccctccagcagagttcctggccctccctacctgacccatttggctcctgaattctgagagcaagcctggatagtgagcgactccagccccacctggggccaacgtgacaaacctagagggaactgcatcctggacccctggcccttgcctgggtcccctcagcccgaggccctaggcctgtgggcagcactgcgctggtccagggacctgaccttcagccttgaccttcagctcccaccctgacaggcagcggggtccctgcactcccatgtctcccttcctcagagcttcctgcagcttcctctccagtccacagcctgcccaacttgggccttaactgtccctcggtgggacatgcctgggccttctcctggctcagtcttgccctcttttgtcctccccagcccagcccaggggcctttctgaacccagctcctccctgcctggacaccatatctggactgtgctgtccgggcagttgagcacgggctgcggtcaggcagacctgtgttcgagtcctcacagcaatggcagctccctccagggcctgctccgtgagggccagggtggcagactccagccctttgggatctgtctgtgggctgggtgcactggggctggctgggggccctggagccacggccaaaggaaccctgagacctgcaggcccaagcctgcccatcctgccgaccacgttgatagaatgcctgtggggtgcgtggcttgactcctcatccctgaaataggaaaacaacagcactggcttcctggggttctcatggagattctctgggttcacatacgtaaaacctgccgtagcacgggtttaatgctctgcaagtggtggccatgacgatgacaaccatggtaccgatgttattgtcagcttccatcctcttttctctattatccccgatgtatgactctcttccatttgccccctctctgcctcatgatttttcaaaacaattcccatggtctcagagagagttctggttgtttatggtttttaaaaaataggcattcaaagcaaattcctcatttgttctccccttcctccccccaaactggaatctggacagacatgacctcactccaggaaaggggagtacagggagggacagggtctgtggagaggggttggggggcatccctccacccccatcactgaggcagggcccggggtgtgggcagacacccaggaaggtcacatgcctgggaccctggttatgagctgtgaggcatggtgtgtgacatgccctttcagccctcctcccaggccaccacctcctggtggggacccaggactgcatcccagctctaccacccactggctgtgtgaccttatgccagtgacttaacctccctgggcctcagttacctcctctgtaaagtggggataacacaggttctccctcacagaactatagagaggatggaatgaaatgtcatcctagccaggtgccctcggtacctggagactggccatgggaggggcaggttcctgccagctcctgttttgagaaaggaccaggtctttgaaacctggaatccaagactgtcagagatggcagggcctgtccgtcatcgaatgcagcctctcagtgcatgggggaaaccgaggctcagagaggggagccgcacagcgggccagcacaaatcccagttgggacgcgagctgcagcttcttaggaccaggaagcctctcccctcatgggtccgagaccctctctgggcctcctccttcatctgaacatgggggcacccaggagcacacgtgctgagcctgatgtggcctgggcctgccttcaaggccatagcactcacctctattcagaaaccgcgcagaagacagaagcaaatggccagtgaaagcagaaaggttgttcacttggtagaggcattaattttagaatgtttattttttattatgaaaggaatcatgattataaaataattcaaatgctataaaaggaaataaaccaaaaatgaagttcactctgtactccccactcccacaccagaggtcctgccttcctagcctggcatgctgccttccagacctcctccacgcacccaagcctaagtaagctatatgcacaaataggaggagttttggttttgttatgtgtgtgttgagacagggtctcgctctgtcgcccaggctggagtgcagttgcacgatcatagctcgctgcagcctcgacctccctgggcttaagtgaccctcccacctcagcctcctgaatagctgggaatacaggcacacgccaccacacctggctaatttttgttttgttttgttttgttttttgagatggagtctcgctctgtcgcccaggctggagtgcagtggcacgatctcggctcactgcaagctccgcctcccgggttcatgccattctcctgcctcagcctcccgagtagctgggactacaggcgcccgccaccatgcctggctaattttttctattttttagtagatacagggtttcaccgtgttagccagggtggtctctatctcctgaccttgtgatctgcccacctcggcctcccaaagtgctgggattacaggcctaagccaccgtgcccagccttttgttttgtttttttaagatagagtcttgctctgtcacccaggatggggtgtagtggtacgatcttggttcattgcaacctctgcctcctgggttcaagtgattctcctgtctcagcctcctgagtagccgggattacaggtacccgccaccatgcctggctaatttttctatttttagtagagatggggttttgccatgttggccaggctggtctcgaactcctgacctcaggtgatctgtctaccttgtcctcccaaagtgctgtgaaccaccgcacctggccagacttttgtatttttttgtagggatgaggtcttgctgtgttgctcaggctggtctcaaactcctgggctcaagcgatccacctgccttagtctcccaaagtgctgggattataggtgtgagccactgcacctggccagaaagcgatttttttttttttaaatgagctgatagtcaacaggtgactctgtcacttgctttctttccttaatggagcatgagccctttccgtttgttggcacctatccggataggtccctccatttttttaaatttttttattatatggagtctcgctctgtcgcccaggctggagtgcagtggtgcaatctcgactcactgaaacctccgccttccaccaaacttccaggttcaagtgattctcctgcctcagtctcctgagtagctggccttacaggcgcctgccaccatgccctgctgatttttgtatttttagtagagacaggatttcgccatgttggccacattgggcttgaactcctgacctcaggtgatccacctaccttggccttgaaaagttctgggagccaccatgcctggcccccctccatctttttactttttactgacctgggtgaatgaaccaatgtataccgatcatccctagagatcacattcagctgctccccgctatggcctcagtgcacattcgcctttgtgtcctgcgaatcgttctatgggggtagattcctagaggtgggagcatccaaggacaggacacccaccctccgaaatggctgtccccattcctggcgcccccagctctgagtgacatggcctgtttttgcatgtccccaccagtgtgacgacaggaaatggagtcttggttctgtttgcatttgtttgattctctgtctatggccattacccgctttcccatctggaggttcaccttttccaaggcagttggttttcacaggaaacgcggggctctggccagaaatgcagcgcagatgagcgcgaggagcctgtgcaaacaattccacatgcaggaatttggggctttgcagccactcctgcctaggggaaggatcgtgatgcatcagcatccctgaggacctcaagctcctgcttgtccttctcttccagaaaaaaccgggaagatcctgacggagttcctccagttctatgaagaccagtatggcgtggctctcttcaacagcatgcgccatgagattgagggcacggggctgccgcaggcccagctgctctggcgcaaggtgagaggtgctgggagggctcgggtatgttctgctacttctcgccatgtggcctcgggggagtgaccttacttttctgggcctcagtttcccattgttactgtgatggcctctaagggtctccccagcttctttttttaaaattaattatttttttcttttttgagacagagtctcgctctgtcactcaggctggagtgcagtggcacaatctcagctcactgcaacctccgcctcccaggttcaaggcactctcctgactcagcctcccgagtagctgggaccacaggcgtgcaccaccatgcccggctaagtttttgtatttttagtagagatggggttttaccatgttggccaggctggtctcaaactcctgacctcaagccatctgactgccttagcctcccaaaatgctgggattacaggcaggtgtgagccactatgtgcggcttattcaattttttttttttcagactgggtcttgctgttgcccaggctggagtgcagtggcgcaatcatgcctcactgcagcctcaaccttcctggctcaagtgatccttccacctcagtctccccagttactgggactacaggtgcacaccatcactctaggctaatttttgcattttttgtagagatggggttttgctgtgttgcccaggctggtctcaaactcctgggctcaagtgatcctccagcctcagctccccaaaagtgctgggattacaggcgtgagccaccatgcctagcctccttcccacttctgaataggtgggtaacccaggtcgtgttgttgagaccccttcagtcaccgtgggtgactcctcctagctcacctcctccaccatcagagctggggctctagagtctggatagtctccaattcaaggcaagctcctccagtaagagcctcagtttactcatctgtcaaatgggatgagaacacctccttcacagggtggttgtgcctgaagcagggaaggcactgtcactggctccatcatgatctgctatgatataaatagtaggatgctgtttgctaaggacatatttgttgagtgagagattagaagctgcctggctccagcctgagggtcagcgtgggccagagggggctggcaaagccttctgggaagaggaacctgtgattgactcggacacggggccgggggcgggactcaagagatcctcccaccttggcctcccaaagtgctgggattacaggcctcagctgccgcacctggccaaggctgagcctttaagtggctcattcaggatggcggaggctggaccagcccagggccctttctgctgtgactgcaacccgcccggtggagggaggtcaggaccgtgtgtcggagctgctcagagcatcacctttgctttttgacccagaaaaggttgcctcttccccagtgtcatggtaacctcttgaccctgtggcagcagagcgtcagaggggcctgctgtggcccggcctgggtgtctggcaggtgcgtatctgtgtggtaggaaaggaaagaaaaggaggccttggacgcagcccaggtgagcggggccagaatggctcccctgtctggaaagaaatgtcatgggcagcccaagtccctataatccaagacaagtgggcactggctgagggcgtgaagcatttcctctgcgtgaggcctcatttaagtctggggaggcaggagtgcatatttatttgtagaaaaatagcaacatgtaagcaaggagagtgaaatgagatcactcacccacagtccctgaaaagcagtatttttggtctcattttggccactcaggaaaccgatcatcacaatgcaaagttatgataacatcataatactggaaataatattaatcaccagtggtgatcaaaacaatagtggtttttattagaaacaataatagaatacaaataaaaatagtgataataatgataacgtaataatacaacagaaataagaataataaaacagcagttgtctttttgtttgtttttgctttttcagagtctcactctgttgcccaggctggagtgcagtggcacagtctcggctcactgcaacctccacctccctggttcaagcgattctcatacctcagcttccccagtagctgggatcacaggcatccaccaccacaccccgctaattttttatatttttagtagagacagggtttcaccatgttggccaggctggtctcgaactcctgaccttaggtgatccacctgcctcggcctcccaaagtgctgggattacgggcgtgagccacagcgcccggctaaaacagcagttatcttatgccggtactgtttgctcagccccgtggccccactctgagggaggggctatgatgatgcctgcatcacagatgtagacattgaggctcagagatgtggagctacttgtccaggatctggcagtcggtggtgccgacacaggagttccagttatctgaccttggggcctgtgctgtctctgaccgaggcattggagagcttcgcagagtctaaaatattttgcctgggctgtcgagttctgtttcatttcctgcaggccttccaattgaacacgactctgccatttgaaagtcttaaaaataaaacccaaacccacagccagccacccattcgagctccccaggatctgggggcggactgggtggtgggggttgttgagcctgcctgggccacaagcctgcttctgcacagcctcctgctgggctgggactggccctgtcccggagtgcccgtccttgtgtcccggggctcctgccctaagcagggatgaagatgaaaactaggggccttttgctagggtgttatgagagctctgtctgctctttctagaaaagacagggatttgagctgggtgtgggcagtttatacatagacggctgagggcagctctgtgacttgggcaaagcccactgtgtgtgggggtggtaggggaaccattttcttttcctgtaaatatttttatacccggtaggaagaagcctgcaggtcctattgtgtgagcacaatgggctctccttctccaggagtgttttgtgtttccccttgaagagcagcagggagggagctggggagagggggacatggtgaagggggtggagagacgggactgcagggatgggccagcgcagagccaggaagccaggaaggtgcaggcatgatggcaatcaccctttctccatgagtgcatctgagaaatgtttctttttgcaaaaggcaccttatttattgtagaacaaatagaatttgcagaggaacactgtactctcctgggttccctcccatccaagacgaagcctcttccactgtggtctatctccttccagaagctttctggtgcttgtctgctcaggacgccttgcacctggccatagcttcgcttgggcccccaaccctagtttaaagatctcccttctccttccccatccccagataagtcagtccctgaggattggaggtcgtcacagacgctgagtcctaccgtagtggtcatggcggtcctgtgcattatgcacctgcctgtcaggtgccaactcttactgttcccattttacagatgaggaaactgatgctcaaagtgactagacacactgtgagtcaggcagagctagggctttgtaggaaggtccgggcgtttctgcagcccatgtaggtcactagcctgccaggacgcgggtcagacatcaaacacccccagacagaggccccctccattccccctactcctttttaggaaggcgtctcatcagccatcagagctgacaggctctctggagccaccttgttcaagttatcattgccctgaggggaaacagaagcctagagctggggagaggcttgcccaggcactggggccctcgcagttctggcctgtgggtgtgtcccccgtgcccggagcgacctcggggcaccagtgctgtagctgtaggtgggtggggagcaaccatctccccagacccttccaaggtagcggtgacagcccaaggctgggatggagagggagagcctggctgtggccaggccctacatcagtgcctgtcctgggttcaagtcctggcatcaccaccctgcctggatgctgggtgagcccctccacggctccgagtctcgctcctcctctgcagaatggatgagatgcagcccggcctcagaggccttgggaggacttggggagacccaaaatggaggacatgctaggcagggggtgcgcacacaggctctgctggctgggccatcagcttcatggggagcaccacccccccagacctgggcctcactccccacccgctcctgcccacaggtgccactggacgagcgcatcgtcttctcggggaacctcttccagcaccaggaggacagcaagaagtggagaaaccgcttcagcctcgtgccccacaactacgggctggtgctctacgaaaacaaagcggtgaggcctggccccgggcgccacactgagcctccccgctttctccatgtgtgccccctcccccaactcggaaacttaggccccagacgccaccgtcacagcctgcacgcggtcaccagggccagagcaccacctcagcccctcccctcccccaaactgggctgccctgggtgccctctctggacggcagctcattcttcatctctggggaatatcgctgactccttctgtccctcataaaccaactgtcactcactcctccccatccctcctaatctctcttcagtccctccagctggctccagggcgttcctcctgccacctccttcctcactgggcttcctgcctctcctccgacccctcccaccctcgacagccacagagagctgttggaggcacaatctggccattccttgcggtggcttgcccctgccctacaggtgggtaggtgtccgagaaggacatcctatgggagcattgtgccttatcttttccctgagccctcagggaagccccacctggttgagccacagacctgatttcttcaattgctcatttctccagagcagccagaaggacaggcctgggccctgtatttcacggaagatcaatgttagagcaacataaagtcaagagcaacctcgtgccccagagtagtggttctcaactggtagcacgtccaaatcacctgaagggcttgctgaaagacacggtgctgggctttcccccagagtttgattcaggttgggagccaagatttgcatctcttttttttttctttttttttttttttttgagatgaagtctagctctgtcgccaggctggagtgcagtggcgccatctcagctcactgcaacctccacctccctggctcaagtgattctcctgcctcagcctcaggagtagctgggactacaggcgtgcaccaccattcccagctaatttttgtatttttagtagagactggttttcaccatgttggcccggatggtcttgatctcctgacctcatgatctgcccacctcggcctcccaaagtgctgcgattacaggcgtgagccactgcacccggactgtaaagatttgcatttctagtaagttctcgggtggtgttgaagatcagagaccatgttttgcaaatcagtgccctacaggttctgagctactttcaggaactgtgttgtatagtgacacctagtggcagggagtagcatggtagccctgctgtatgagctattccatcagaactgctttgccccctgctactggtgtaagtttctagacctaattctccagaggacgcttgtgtgatgctcagaacctaggaaattggtgggggcagttcagggtaatggtcaaataccccaggctctggagatagatagccctggttcatgtcctacatctgctacttcccaactgtgtgaagttgggggtgatccaccttttgaattgggaaaattctgtgaaattaagcatgcaatgcccttagcacagggcctggtatgtaagaaatgcttaactagtggagctgctgggaacagaggcaatagcagcagtagaaacagaacaacaacctcggccaagctcgctgagtccttgtggtgtgccaggcactgcagattatctcactcagtcctcacatggctctgtgaggcaggaatggttattaccctggttttgtttttattttaaaatgttttccccatcctgaatattcttgattccctggttttatagatgaagaagctgaagtttaggcatttaaggaattttatcctcagcatcacacagacactacccagtgaagccaggaattgagcccagagctggggtctaggttgctgtggatgccacactgccccaatcaccatgatagtgacattctcccctctgttcctctcttgcctcttcttcctttcccttctcctccccactttgggccacactgagtagggccttgaagccaggtgggatttgggcttggccgcaccttaaccctcagggaccctctctcttgcctccctcaggcctatgagcggcaggtcccaccacgagccgtcatcaacagtgcaggctacaaaatcctcacgtccgtggaccaatacctggagctcattggcaactccttaccaggtaaaggagcacccatcccaggccacaatgccctgcacaggcatctggagctggccaggggaggggtggccctgagcccattgctttcagccccatgtttgcggagagaccaactaggcttagagctgtggatggagacctcattgtttgcctttcgcatctccctaagtccttgagagcctcctggaagatgttcagtgaccttccctcgtaaacctgtgggtcagcactgtgttcgtcaggagttactcttcttggcatcctgcttttgcttcaccttggctgaaattccctagaagccttacgggaacaacattggcctctctgatgatccctgggaactagagggcaggggacatgcctgcctggggggcaggtcatgccccagggacttgagagtagagtcatgccttcattctgtggtgatggagggcctgggcattcctggattcgagcggcattcctggattccagcagcattcctggattccagcgtgactctggctttgtttcactgtgtctgcttgggcgagtcaccccccctcccctgaatctcagcctcttcagtgtctacaaagcacaggcactaagaggactgccctcggggtgttgtgtggaccctggaggggcacaggccaacccagagccagggcagaaagaagaactgttattgtcatatcattaacaacagtggcagggtcacagcccaggaccagttatctcgctggatcttacatatccttgagaatgaaattgaaggagggaaaaattccttttgctgtattttgtccctccccacatgcctccctccccctgtggacacttaagccacactttggcctccacagccgaaatctgaagggaaacccaagaaggtagtgcttgacccttgaacctgggggctctgaccttgtgttgtttgtgctttacagagtttaaaacctaacccaagagtggggtggatgtgacttattacccactctaagaaatgggtctgcacggatgctggactcaggttttgggctgaggagaacacagccagaaagaaggctgctcccacccccgccggcttgctggtcaccttgggacaggctggccttctctgggcctgagcctgacctcagagctgatgccaagggatcagttctctgacatcctctggtggagggcaaccacagagggcagctgctcatcaggcactgtctccacagggaccacggcaaagtcgggcagtgcccccatcctcaagtgccccacacagttcccgctcatcctctggcatccttatgcgcgtcactactacttctgcatgatgacagaagccgagcaggacaagtggcaggctgtgctgcaggactgcatccggcactgcaacaatggtgagtggcctgtgggtgcagggtcggtgggagggaggggcaggacctgggttattgctgaatggtgacacctagtggctgactatggtgtggcaaccctgctctacaggctgttctaatttcccttctggggttataagaaaccatgtaataccacccttagtcttctttcttgatgaaaacagttttgtgctgctcaggaaaaaagtaggaaattattcacagaggggtgtggttgttgagcccttggaccctgagtcacaaagtcacaatcctgattctgccattttccagctacgtgaccttagggaactgacttacctcttggaggctctgtaaagtggggataatgccttgtgtgtcttaggggggttatgaggatttagagtctacctcatgcttggtaaagattttttttttaattttatatatatatatatatatatatatatatatatatatatatatatatatatatatatatattttttttttttttttttttttttaaaaccaccaacctgcagggtgatttggaaacttcactgcctccctcagggcctcattgctctcatctgtaaacttatggggtgactcttccagctcactcatttattcaacaaacatttttagtgtctactctgaggaggcccagatttaggcactgggtgtgcaacaagggagcaagaaacattccctgccctcctacaattggcagtctggtaggggagacagatgatagacagatgaggatgccagcacgatggctcacagctgtgctgggtgctgggtggagccaacctgggagcctgagggtgtgtgtgtgttgggggaggggtcgatcagggcaggctcccttgaggaggttatggttcagcttcagcagagacctgaaggagaagtcccagacctgaaggaggagatgccagaagtcccagggcccctcatatcctgcatagaggagaggggaggagtgttccaggcagaggtaggcagtcagcatgaagggagacccacaggtggtaggggtaggcccggaggaggaactgcacgaggccctgaagcagggagggggtgacctgaaatggggctggaggggggcctctggggtcaggtctggaaaagccttgaaggcctctaaggaatttgaacagaaaggctgaggatggtcttccaaggtgagggtgggtccctgggggtctttctgcccctagggaaggaacaacccagtcctggacactgaactgcttccaggtgatctggcctgagggaagctcctgcccccgccccacccttgggcgcagtgccacatggtgcagaggtggaaggttgcaggggacggagtgggcgccaatggcctctgggctgctgccgtgggactcagctcaccccacccctcctgctcgcctctccagagccacctctgccctgtctggaatctgccaagcaggaggaaccaggtcttcaatcaggccagcccctgccacctgggcccagctgcccacaaagggcctcctgttcccaggtcccggggactgtgggctgggactgggtggaggcactcaaggctctggctgcctggcccagggccctcccgcctccccagcccctggcctggtgccatctctccaggtttccaaggctaacggctgacctggcctggcagggtgggtgacctgcgccagatagggaaggggtgggcacagaacaaggtggggaagggccacctcagtcccccatgtgtgcagtggggatgatgataaacttgagcttgagagatgattgggaagagctggtctgggtggggcacttggccgtgggcctggcacgcacagtgagcactcagtggggaggccatgggggagttcttggttctaaggtgcagtggaccagagggaggcccaggagagctgctgggccagggaatgaaggggtgtcctgtgccaggaaggtgtcctgccgggtggccccttctccccagggcgggagctgacgaggctggtttcaggccttccttccaccctgcggactgtgagaaagttctctgcttcctccgtcttggaggctgggcttggaatttgtgaagcctggaattgctcactccgggggctgccaggaagtggggggtggggggaaggaggccaactgggcggacaccagcggtcccagggaccccttcacatcctgcattcctggagcagctgggggtggcaggaggcagctggggcactggctgtgccgggtcctcagtgttggcctggggtgcagaggtcaaggcttcttcctgtctgaccgtggtccccctctgtctgctgcctgggagtgaggaatgcagtttcctttcttggaaggtctccaggtctggctagagtcagctggtcctgggttcaagccccgctctgccatccactagctgagtagcctcgagcagtaactgcctctctgagcctcagttctttccctgggaaaagtagggcacagtgagctgaggattcaacgagctgatgtgtgtgcagcctcagccagggctggggcctcagtttcccaagactgccataacaaataccacagaccgggcagctacacagcagaaatatgttctctcccagctggaggtctgagtcgagggcaaggtgtcagcagggctggtttctccgagacctctctccttggctggtggccggccgccttctccctgagtcctcacagggtcatgcctctgtgtgcctgtgttttctcttctttcaagaagaaatgtacttttctttttttctttttcttttttcttcttttttgagacagaggcttgctctgtcacccaggctggagtgcagtggcgcaatctcggctcactgcaacctccgcctcccaggttcaagtgattctcctgcctcagcctcccgagtagctgggactacaggcgtgtgccaccacacctggctaattttttgtagccagaatggtcttgatctcctgatctcgtgattctgccgcctcggcctcccaaagtgctgggattacaggcgtgagtcactgtgcccggccaaaatgtactattcttttaagggcactagttgtattggatttggtcccatcctcatcccctctgtttaacttaattctttaagactctaggaccaagggcgggtgcggtggctcaggcctgtaatcccagtgctttgggaggctgaggtgggtggatctcttgaggtcaagagtttgagaccaacctggccaacatggtgaaaacccatctctactaaaaatacaaaaattagctggacatggtggcgggtgcctatagtcccagctacttgggagctgaagcgggagaatggcttgaacctgggaggcggaggctgcagtgagccaagattgcaccactgaactccagcctgggcgacagagtaagactcttctcagaaaaaaaaaaaaaaaaaaaaaaaaaagaccctgggtccaaatataatcacgttctggggtactgggggttaggactccagcatatgaatttggggggtgtggagacacacttcagcccctaacagctaggctcacgggaagagctcaggaggggtgaccctgaaacttgtcacactcagcggctgggtgtgcagaaagagagaatcccaagggtcaaggctggctggcctccctcccgctgtcccggccctctgcctcaccttctcgccacctggaaagcaggcctgccctgcacacctgacttggtgcatgcaggatgaaaattccctctccccgtgggagtgcctgcaggtaacgcactgtccagattttccagtcaaaacttggtttctaggaaaccatgcccttctgagaggcgggtggggtggcggggggacctccttccctggcccaggtgggcagcccccacccagggctctgcatgctgctccagctggaacatccctgccctgctcctgtcactcctgcctgacttcaggtctctgaaatgcaggagtgagactcccacaggcccccgtccccatccaggcagctgcgctgtagggatgagggctgggcctccccctgctcagctccctcccggctccgacaggcagtgatttctgtggtcagctgggtgtggggagaggagggacccagagaggggctttttctctgccggtggtgactcagcccatagtcatggcagtgggagccttaggtttctgatgcacaggcttccgtttccccttcctgggctttggggatgcggtggtcagaggcacgcggccaggggagtctgcctgctgcctggctcggtggcgtttgaccaccttcttaccccaagtcagattttgtaacttcctgccaattgcctcccgggcactgaatctggaggtccacgcctcactcaggggtttaccttgctggcgtttgggccactgacagcaccaacagtgacaaaaattcagaaatggtgttcttctagctgttattaatagcaaactcttccattcttttttttttttttttttttttttttgagacagagtcttactctgttgcccaggctagagtgcagtggcgcaatctcggctcactgcaacctctgcctcctgggttcaagcgattctcctgcctcagtctccctagtagctgggattacaggtgcctgccaccatgcccagctaatttttgtatttttagtagagatggggttttgccatgttagccagactggtctcgaactcctgacctcaagtgatttcccccacctcagcctcccaaagtactgggattgcaggcatgagccaccacacccagcttcattctttaacaaagttattcaagcatctgtgccaggtactgacctggacttagcagtaacaggacagaccccgggcccagtggggcaggcagctggctcctcagttattgataaaaagtgtggcgcagagcagtgctggaccctgatctcctgtccctacactgtggcccagggagccccgcagtggacctgtgaggccattgttccattgttcagaagaggaaacaggccatttcgggttcagtgatctagaaccaggctctgaaacctatggcctatgggcccagatcagccaattgcctgtttctgtcaacaaagtttattggagcagaggcacgctcatttgtttctggatggtccgtggctgtttttgtgctgtgactgtagaggcgagcattgcgggaggggttttatggcctgccgggctgagaatatctgctgcctagcctgttccaggcaaagtttgaagggccctgatctagcagtaagggaggaactggggctcgaacaagggtctctgggtgcctctagggccattctgggtggctgcttatgggacgggagcttttagtcctggctctgccactccctgctctgtgaccctgggcccgtggcctgtcccctaacggttgtctcttcatctgtaatcatctgtaaagcaataaggtgaatgatagtgcccaggtcttggggtggttgggaggatttcaggagctaaggaggaggcaagggggctgccttgtcactgttggtggtggggtcattactgcttttgcctatcagatacaaccatgactgctctgatgacgaggaaagtgagggtcccagctgcccctcctgaggtgcatgccatgtgtgtggggggggttttggtcagttctcagttggtcttggtagaggccactgggccatctgctgacctcctctctccctccgtctcctgggcaggaatccctgaggactccaaggtagagggccctgcgttcacagatgccatccgcatgtaccgacagtccaaggagctgtacggcacctgggagatgctgtgtgggaacgaggtgcaggtgaggccagacgggctggtgaggaaacctcagaagtcacccaaggacccagcaggggagggcagggggtggggtacagagatggggctctggggcgctgccggtttggaaggagatgacatgcttagatttggacaagtgcagggccagtgcacgtggagatactcgctgtcttattcatcacttactgggcatctgagcacctaccctggacgaggcactggggtgcagctgggaatgatgtggacaaattcctggccctcagggagctctccgtatagcaggagaaacagacatttggcaaataaatgtacacttccatgtgcaggcaaagcagggagggagtatggtattctaggtagggaaggcagcctgtgcaaaggccctggggctggcccttgagtctgaggatcctacaggacacccaggcagatgagttgggacctgtgggaatggagctcaggagagagggcagcagggagggtgaagcaatgggccagtcgcggaggaggtgggggctgcagcggcctggcttgtgggaatgcagagagaaacaggccagctgagcgctctccagcccctggcctggcttgtgcctcctcaacctagatcctgagcaacctggtgatggaggagctgggccctgagctgaaggcagagctcggcccgcggctgaaggggaaaccgcaggagcggcagcggcagtggatccaggtgggtgggcctggggccctggagcggggacgggacctgcagctggtgcggtgccctcagccctggtgccaattcagctgctctgcccacagatctcggacgccgtgtaccacatggtgtacgagcaggccaaggcgcgcttcgaggaggtgctgtccaaggtgcagcaggtgcagccggccatgcaggccgtcatccgaactgacatggaccaaattatcacctccaaggagcaccttgccagcaagatccgaggtaggcagccacccccgtgctcgacgggccctccaggggccaaggtggactttctttttatttcatgattcatgtaaatttcacagcaatgacttgctcattgatcatttgtaagaattagagccaaatctgcactgtggtactccaacccctgtgagttgttttgtggctattatttctataagcccagaacttgaagagaaaaatttttgttctggaggttcaagccttcttttcatctctgactcgtcacagatttttaccatgtgtcattttaaagtacatttacgttcagcaagtatagctttcccaggtcagtttattctgtcacccaggctggaatgtagtggtgcgatctcagctcaccacaacctccgcctcccggattcaaacaattctcctgcctcagcctcctgagtagctgggactacaggcacacgcgcgccaccatgcccggctaacttttgtgtatttagtagtgatggggtttcaccatgttggccaggctgatcttgaactcctgacctcgtgatccgctcaccttggcctcccaaagtcctgggattacaggcatgagccactgtgcccagactgtacgcctttctcttcccagccagatgggatcctttcaccagcttggtccccataacacatctgcagagctcagttttagcaattgtcagttgcccatgggacgttctttttattttattttatttcattttattttatttgagacagggtttcactctgtcgcccaggctgcagtgcaatggcacgaccttggctcactgcagtctctaccatcctcccacttcaaccccccaagtagctgggactacaggcatgtgccaccacgcccagcacatttttgtattttttgtagagacagggttttgccatgttgcccaggctggtctcaaatgcctgagctcaagcaatccacccaccttggcttcccaaagtgctaggattacagatgtgagcgactgtgcccagccattattattattattattttgagatggagtcttgatctgttgcccaggctggagtgcagtggcacaatctgggctcactgcaaccttgcctctcgggttcaagcaattctcctgcctcagcccctcaagtagctgggattacaggcacctgctaccatgcccagctaatttttgtatttttagtagagacagggttttgccatgttggccaggctggtcttgaattcttaacctcaagtgatccacctgcctcggcctcccaaagtgctgggattacaggtgtgagccactgtgcctggcctgttttttttgtttgtttttttttttttttttttgagacggagtctcgctctgtcgcccaggctggagtgcagtggcgtgatctcggctcactgcaagctccacctcccgggttcacaccattctcctgcctcagcctcctgagtagctgggactacaggcgcccgccaccatgcctacctaattttttgtattttttagtacagacaaggtttcaccgtgttagccaggatggtctcgatctcctgacctcatgatccgcccacctcggcatcccaaaatgctgggattataggcgtgagccaccgcgcctggccgcccggcctgttttttaagagacagagtctcgctctgtcttccaggtagagagcagtggtacaatcatggttcactgcgtgacctcctgagctcaagtagtcctcccacctcagcctcctgcgtaactgggactacaggtgcaggccaccacgcctggctaatttttaaattgtttgtagagaaaggggtcttggctgggcaaaactctatctcttttaaaaatttttgaaagagagagagagaagggggtcttactgtgttgcccaggctggtctcgaactcctggcctcagacaatcctcctgcctcagcctcccaaagcactgggattacaggcatgagtggccgtgcctggtctcctgtaggttattctttactagccagatcctgagtattggttgacagctggataggacactgagcattgacatttcttgtgtggaacaaagaacgttagctgggctgggatgggggtggacatctaaatattcttgagtgaaaatgctttggtcagaatgttctggagatggtccccacccaaaggaagaaggcttttacataattatgcagagccagccacactattccagagaggatcagcccagtttttgtaaaaccaagaggctcattgaatctactaaggtatttttcattgctgttgttctttttgttcaaacgaagaagcaagacccatcctaaaggagtttttgtctacttctagctaagcagaacactgctgacacctctgggctggcagttttcttattttattttattttcattttcatttttaatttttgtgggtacatagtaggtgtgcatatttatggggtacatgagatgttttgatcaggcatgcaatgtgtaatagtcacatcatgggaaatggggtatctatcccctcaagcatttatcctttgtgttacaaacaatccaagtatattcttttagtttttttttttttttttggacacagagtctcactcttcttgcccaggctggagtgcagtggtgccatctcagctcaccgcaacccctgcctcccaggctcaagtgattcttctgtctcagcctcccaagtagctgggattacaggcacataccaccacgcccggctaatttttgtatttttagtagaaatgggatttcaccatgttggccaggctggtctcaaactcctgacgtcaagtgatcttcctgcctcggcctcccaaagtgctgggattacaggcctgagccactgcacctgtgcagcctcttttagttacttttaagtgtacaattaaattattattgattatagtcaccctgttgcgctatcaaatactagggcttattcattctgtaaccagaaaggggtcccgatccagaccccgagagagggttcttggatcttgggcaagaaagaattcaaggtgagtccatagagttaaagcaagtttattaagaaagcgaaggaataaaagaatggctactgcgtagacagagcacgagggctgctggttgcccatttttatggttatttctgatgacatgctaaacaaggggtggattattcatgcctccctttttagatagagcatatagggagacttcctgacgttgccatggcatctgtaacctgtcatggtgctggcgggagtgtagcagtgaggacgaccgaggtcactctcatcaccatcttggttttggtgggttttgggccaccttctttactgcaacctgttttatcagcatggtctttatgacctgtatcttgtgccgacctatctcatcccatgacttagaatgccttcaccgcctggcagtgcagcccagtaggtctcagcctcattttacccagctcctatttaagatacagttgctctgattcaaatgcctctgacatttctactttttgtgcccattaaccattcccatctccccctcgccctcgactaccctctccagcctctagtaaccatctttctactctatctccatgggctcaattgctttgttttctgcttgtttatttgtctgtttttaccttttttattgctcccacaggggaggccccctccaaaatgtcaatttgctttaatttttagatcccacaaataagtgaggacatgtgatatttgtctttctgtgcctggctgaatataatgacctccagctccaaccatgttgttgcagatgactgaaactcgttcttttttacggctgaatagtaccccatcgtgtatatgtaccgcattttctttatccattcgtctgttatggacacttaggttgcttccaaatcttggttgttgtgaacagagccgcaacaaacacgggagtgcagatatcgctgcgatgggctgatttcctttatttgggtatatacccagcagtgggattgctggattgtgtggtagctctattagttttttgaggaacctccaaactgttctccatagtggttgtactcatttacattcccactgtgaaccctgaaaatttgaggcaggtctcagttaaattagaaagttgattttgccaagttggggacacgcactcgtgacacagcctcaggaggaactgatgacatgtgcccaggtggtcagagcacagcttggttttatacattttagggaaacctgagccatcaatcaacatacgtaaaatgggccgggcacagcagctcaagctgtaatcccagcactctgggaggccgaggcgggtggatcacttgaggtcaggagttcgagaccagcctggccaacatggtgaaaccccgtctctattaaaaatacaaagcttagctggatgtggtggcgcatgcctgtagtcccagctgctctaggaggctgaggcatgagaattgcttgaacctgggaggcagaggctgcagtgagccgagatcgagccactatactccagcctggtcaacagagtgagaccctgtctcaaaaaaaaaaaaaaaatgtaaaatgaacatggttcagtccggaaaggcgggagaacttgaaggaaaagcaggacaactcaatgcaggcatgaggcttccaggtcataggaagaaaagagacaaatagttgcattcttttgagttgatgattagcctctccaaaggagggaagcagatatgcattaatctcagtgagcggaggggtgactttgaatagaacgggaggtgggtttgctttaagcaattcccagcttgacttttccctttagcttcgtaattctgggggcctaagatattttcctttcacaccaccagcagtgtacggaggttcccttttctccacatcctcgctagcatttgttattttcttttttttggataaagccattttaactggggtgacgtggcatctcattgtagttttgatttgcagttctctgatcagtgatgtcaagtaccttttcatatgcctgttttgggttgagtacctttcatatgcctgtttgccatttatatgtcttctttggggaaatatgtattcaaatcttttgcccatttttaattggattactaggatttttttcctatagacttgtttgagatccttatattttctgattattaatctcttgtcagatggcagttttcttagttttttgccatcatggtttcagaaagatcagagtccaatctcagaacaccttgtcatttttcctgcatggatttctcatctttatccactatttctctgaaatcattcagcttgctaatgttgcccccagtggtttttttttttaaataatattggccaggtacggtggctcatgcctgtaatcccagcacttgggaggccaaggcaggaggatcacttgagcccagggagtttgagaccagcctggataacacagtgagactctgcctcttaaaataataataataataaaagtattgatgggggctgagcgcggtggctcacgcctataatcccagcactttgggaggccgaggtgggcgggtcacctgagatcaggagtttgagaccagcctggccaatatggtgaaaccctgtctctactaaaaatacaaaaaaaaatcaccgggcatggtggtgcacacctgtaatcccagctacttgggaggctgaggcatgagaatcacttgaacctgggaggcagtggttgcagtgagctgagatcgtgccattacattccagactgggcgacagcacgagactctgtctcaaaaattaataacaataataatatgatgggaagagagagttgggagagggctgaaaaattactttttgggcactgtgctcattacttgggtgatgagatcaatcctacccaaaacctcagggtcacacaatgtacccatggaacaagcctgcagtgtaccccctgcatctaaaataaaagttgaaataaaaatgataataatattaggaggctgaagtgggaggattgcttgagcccaggagtttgaggctacagtgagctttgattattccactgcactccggcctggacaacagagtaagaccctgtctcaaataaaataataataggccgggcatggtggctcatgcctgtaatcccagcactttgggaggccgaggcgggtggatcacgaggtgaggagtttgagaccagcctgaccaacatggtgaaaccccgtctctactaaaaatataaaaattagctgggcacagtggcacgcgcctgtagtcccagctactcaggaggctgaggcaggagaattgcttgaacctgggaggtggaggttgcagtgagctgagatcgcgccactgcactccagcctgggcgacagagcgagactccgtctcaaaaaaaatataataataatgataataatagtaatacagtagcctccagcacctgggctctgggatggctgggaggtgctccttggggagcccctgctgacccggctccctcggggcacagccttcatcctccccaaggcagaggtgtgcgtgcggaaccatgtccagccctacatcccatccatcctggaggccctgatggtccccaccagccagggcttcactgaggtgcgagatgtcttcttcaaggaggtcacggacatgaacctgaacgtcatcaacgagggcggcattgacaagctgggcgaggtgaggccggcaccgcccctaggagggggtctcctgagagtaggtctggtctgtcccagagggccccggctgcgtgactccgggcagccgttcccctccaaggccgtccctgtagacggggaggggctgctggggactaggggcagaggctgtgaggccagggctgttggagtcctcgtggggcctgcagtttgaggaaagagggaacattagctcccggccaccagcctttagaaaccaagagtggtgctaaaatagaaaagaatttaacagaagagagggaaggagggaaggagaggaggggagagggaaggagggaaggagaggagggaaggagggaaggagaggagggaaggagggaaggagaggaggggagagggaagggcgggcttcaggtggagtaatgagattgataaggaagaattcacaagtcacgcgccctccaaatggagacagccgttgcccttacttgacctcagttatctggctctcggggtgaacgtccttccacagtctccatcttgggctggctgcccggagcccgcatagttgtcagattgaatttatcctgtatcttagtttcctcctttatactctgaaatggggagtccacagaccataataatcccagaatctgagacctggagaggaccttggagagcaggaaagctctctcccaattttgaagctgaggaaactgaggctcagagagggtgaatgacttgcccaaggtcacccagcacctcagaagggatgagtgccttctgccggcaccgaggctgcctctccacagcgctgtgccactggactgcgccctccatgccttcagagcctcatgcttctgtcctgggccctcctgggtttacctttgtggccatgagcaccaggtggccatccctggtagcaggcgccagccccagggcctggacttcgaggacccaggcaaagtgtgtggggggtgctgcctggccacagggcggccctgctcagcccccgcggccccggcccctgcagtacatggagaagctgtcccggctggcgtaccaccccctgaagatgcagagctgctatgagaagatggagtcgctgcgactggacgggctgcagcagcgatttgatgtgtccagcacgtccgtgttcaagcagcgagcccagatccacatgcgggaggtagacccgaggctacgacccccaccccacaccctgtccactgccttccacaggccccctcgcccagggggtcccttctgctccgtcccgtcatgccatagccacgcttgcctggcacgctctctcctcctctgcttggaacatctgtgcctctgcccacctggctaattctgactcacttcccaggtctcagcttagagaccccttcctccaggaagctctccttgcgcccccaggccccttcccatatttcctgttgccttgaggcagggacttgctccagcgtgcagagctgtgagtgggcatagaccgcttgccattcctccctggcaggcctcggggtggggggctggttgaggatgaggacccctcagcggcacccaggaaggggctgtggtcaccctgggggcttcacatgtccgcggtatgccctgcagcaaatggacaatgccgtgtatacgttcgagaccctcctgcaccaggagctggggaaggggcccaccaaggaggagctgtgcaagtccatccagcgggtcctggagcgggtgctgaaggtgagcggccccacgccctgccccggaccgtcctaggcgaggccgagccccgagcctcatccccggccaccaccaggattgctgtccctgcaaggaggcgccatggtcctcttgtgcggatgaggactcggaggcttgggtcagaccactggcctcgtcctaccctcagggccaatggagcccactgacctgcagacccccgacccccttgttccctgcagaaatacgactacgacagcagctctgtgcggaagaggttcttccgggaggcgctgctgcagatcagcatcccgttcctgctcaagaagctggcccctacctgcaagtcggtgagcagcccccacctgctccagccgtttgggccctaagttgggggatggagcccacaggcctccctctacccttggccctgacctctcatctctgccgccccacccgggcaggagctgccccggttccaggagctgatcttcgaggactttgccaggttcatcctggtggaaaacacgtacgaggaggtggtgctgcagaccgtcatgaaggacatcctgcagggtgggtgccgtcccggggtggggactgttgccaggaggatgctgggggcgcagctgagaagtggtggcagctgagggggtcagctaaggctcaaagaaaagcccagacttgcacctggggtctgggtgaagcccactcttcgctgtgtggcctccggagcagccttagccttgcgtctctgtgctttagtttcttctcgcgtccttggctttgctgggagggtcagaggagtgattagatgacatgtggtcagcagcctgggcctggagatagcatcacggccttgctgctttcagcaacgaggcctggaatgagtcacatcccaaccacagacccccaaggcgggatgagacgggtcttctttgagcagagtccagcacaggggcggctgtgggatcagtgctgtgtcctgacccttcccctgtggccctgtagctgtgaaggaggccgcggtgcagaggaagcacaacctctaccgggacagcatggtcatgcacaacagcgaccccaacctgcacctgctggccgagggcgcccccatcgactggggcgaggagtacagcaacagcggcgggggcggcagccccagccccagcaccccggagtcagccaccctctcggaaaagcgacggcgcgccaagcaggtggtctctgtggtccaggatgaggaggtggggctgccctttgaggctagccctgagtcaccaccacctgcgtccccggacggtgtcactgagatccgaggcctgctggcccaaggtctgcggcctgagagccccccaccagccggccccctgctcaacggggcccccgctggggagagtccccagcctaaggccgcccccgaggcctcctcgccgcctgcctcacccctccagcatctcctgcctggaaaggctgtggaccttgggccccccaagcccagcgaccaggagactggagagcaggtgtccagccccagcagccaccccgccctccacaccaccaccgaggacagtgcaggggtgcagactgagttctaggccagtgggtccctgactgctgcacatggcacaggccgttcccttccggacccaggcaggctcagctctggggagggcaccctggtctgtgccttgtgggtggaggcggggcagggctgtgtggcaccgccagggagcgggcccacctgagtcactttattgggttcagtcaacactttcttgctccctgttttctcttctgtgggatgatctcagatgcaggggctggttttggggttttcctgcttgtgccaagggctggacactgctggggggctggaaagcccctcccttcctgtccttctgtggcctccatcccctcatgggtgctgccatccttcctggagagagggaggtgaaagctggtgtgagcccagtgggttcccgcccactcacccaggagctggctgggccaggaccgggagagggagcactgctgccctcctggccctgctccttccgcagttaggggtggaccgagcctcgctttccccactgttctggagggaaggggaaggagggggtcttcaggctggagccaggctgggggtgctgggtggagagatgagatttagggggtgcctcatggggtgggcaggcctggggtgaaatgagaaaggcccagaacgtgcaggtctgcggaggggaagtgtcctgagtgaaggaggggacccccatcctgggggatgctgggagtgagtgagtgagatggctgagtgagggttatggggagcctgaggttttatgggcctgtgtatccccttctcccggccccagcctgcctccctcctgcccgcctggcccacaggtctccctctggtccctgtccctctggtggttggggatggagcggcagcaaggggtgtaatggggctgggttctgtcttctacaggccaccccgaggtcctcagtggttgcctggggagccggacggggctcctgaggggtacaggttgggtgggccctccctgagggtctggggtcaggctttggcctctgctgcctctcagtcaccaagtcacctccctctgaaaatccagtcccttctttggatgtccttgtgagtcactctgggcctggctgtcgtccctcctcagcttcttgttcctgggacaagggtcaagccaggatgggcccaggcctgggatcccccaccccaggacccccaggccccctcccctgctgctttgcggggggcagggcagaaatggactccttttgggtccccgaggtggggtcccctcccagccctgcatcctccgtgccctagacctgctccccagaggaggggccttgacccacaggacgtgtggtggcgcctggcactcagggacccccagctgccgcagccctggtctctggcgcatctcttccctcttgtcccgaagatctgcgcctctagtgccttttgaggggttcccatcatccctccctgatattgtattgaaaatattatgcacactgttcatgcttctactaatcaataaacgctttatttaaagcca

SEQ ID NO: 2 - DNA, 73651 bp, Homo sapiens
caggaactgggccagttccggtcccttccttttggggctctcactctggaggatggggtggatgggaggtaagacttgtgcacaagtccccaggacacaaggcacacggggttcttttttgtttgtttgtttagagaggaggttttgctctgtcactcaggctggagtgcagcggaatgatcatagctcaatgcagcctcaaactcctgggctcaagggatcctcacttcttgacctcccaaagcgtcataggcttaaggcactacagcacccactgacaaggggttctttttctttttcttttcttttcttttttttttttaggcggagtttcactcttgtcaccccggctggactgcaatggcgagatctcgcctcactctcactgcaacctccgcctcccagattcaagcgattctcctgcctcagcctcctgagtagctgggatgacagggccccaccgccatgcccagctaatttttttgtatttttagtagagacggtttcacgatgttggccaggctggtcttgaactcctgagctcagatgatccacctgcctcggtctcctaaagtgctgggattacaggtgtaagccatggcgcctggccactttttttttttttttttttttttgagaccaagtctcactctgttgcccaggctggagtgcagtggctggatcttggctcactgcatcgtctgcctcctgggttcaagggattcctcatgcctcagcctcccggatgggatttcaggcacaggccactacgcccagctaaatttttttttttttttttgagatggagtcttgctctgtctctcaggctggagtgcagtggcgcgatctcagctcactgcaacctccgcctcccagatacaagtgattctcctgcttcagcctcccaagtagatgggatttcaggcacccaccaccacacccagctaatttttttgtgtttttagtagagacagggtttcactgtgttggccaggctggtctcaaattcctgacattgtgagccacctgcctcagcctcccaaagtgctgagattacaagtgtgagccactgtgactggcccaacatttttttttaattaaaaaattaaagccaggtgtagtggtgcatgcctgtagtcccagctactcaggaggctgggtcgggaggattgtttgagcccaggagtttgaggctgcagcaagccatgatcaactcactgcactccagcctgggttacagagcaagaggtcttatccctgaaacaaacaaacaaacaaaaagatatagcagagaagcccattttgtgtttgagaaagagctgaactctaggattggatctggaggatggtgtgggaagcgtggggtattggatctggaggatggtgtgggaagcgtggggtattggatctggaggatggtgtgggaagcgtggggtattggatctggaggatggtgtgggaagcgtggggtattggatctggaggatggtgtgggaagtgtggggtattggatctggaggatggtgtgggaagtgtggggtattggatctggaggatggtgtgggaagtgtggggtattggatctggaggatggtgtgggaagcgtggggtattgcagctctaaagtaggcagagctatgtatgggtctcatcctcatctcttaatttttttggggggagggtggacacagtctcgctctgtcacccaggctgcagtacagtggcgcaatctcggctcactgcaacccctgcctctctggttcaagtgattcttgtgcctcagcctcccgagtagctgggattacagacgtgcaccaccacgcctggctaatttttgtatttttagtagagacgggctttcaccatgttggccaggctggtctcaaactcccgacctcaggtgatccgcccacctcggcctctgaaagtgcgtgagccactgcacctggcctcatctgttactttaaaataaaataacaataaattatttaaaaatagaggctgggcatggtgccttacacctgtaatcccagcactttgggaggccgaggcaggtggatcacaaggttaggagtttgagactagtctggtcaacatggtgaaaccccgtctctactaaaaatacaaaaattagccggacgttgtggcacttggggaggctgaggttgcagtaagctgagatggcgccactacactccagcctggtgacagagcaagactctgtcttgggaaaaaaaaaaatagagacgaggtcttgctatgttgcccaggctggtctcaaactcctgggctcaagcgatcctcctgcctcagcctcccaaagtgttgggattacaggcgtgagccactgtgcctgatctcatcctcatctcttacttatacctcatgaagcctcagttttctctcctgtaaagtgggtgttccccaaaagttgtgaccattcaatgaggcagaagctataaagcactgaactgagcacaggagcctgcaatgaacgggcgcttccattatctttatcatcctgaagttatttctcactccctgcctgtctgctggcacttcagcggccccctgcctgacttcagtgctgttggatccaaccacggaatttgtgcctgggaaggcggtaaggcacccccttcctggaagtttacaagcagaagctctgcacagtagcagaggcccacatgcactatagaagggactttgtaccccatgatgtgtcatggccactgcaggcatgagtgtttcagtataggtctatgaacaaacctgtgaggtcccaaggaccaggtgggtccctcactgtcacgttcccctccagtgcccaggatagtgttctgcacatcatacgtgctccctcaagctcccattgcgactgacgctagtgatgtcatgtcgaaggaggacagtcctggtcctcagagagaaagatttatttaaacagataattgcacacacacaaaatcatgttgaatgtgatgcttgccatgaaggaggagtttaggacactggggagggggtgataataatggcaggcctgacctagtaggggggcagggtgcagaaatgtcctctctgatgaagggtaattagctgaggttgaaggctgaatgctgcttggtggggcaagatgcgggaaaaaaatccatgtttcacacagccaggcacggtggctcacgcctgtaatcccagcactgtgggagccaaggcgggcggatcacctgagctcaggagtttgagaccagcctgatcaatatggtgaaaccctgtctctactaaaaataccagaattaaccaggcatagtggcgggtgcctgtaatcccagctactcaggaggctgaggcaggagaatcgcttgagcctgggaggtggaggttgcagtgagcagagatcccgccactgcactccagcctggacgacagagcaagactccatctcaaaagaaaaaaaaaaaaaaaagggcccagcacagtggctcatgcctgtagtcccagcactttgggaagctggggtgggtggatcacgaggtcaggagttcaagaccatcctggccaagatggtaaaaccccgtctctactaaaaataccaaaattagccaggcgtggtggcaggaacctgtaatcccagctacttgagagtctgaggcagagaattgcttgaacccaggaggctgagtttgcagtgagccgagatcgcaccactgcactccagcctgggtgacagagcgagactccatctcaaaaaaaaaaaaaaaagaatccatatttcataagctgtgaggtgggatggagcagggctagtttgaggatgtgaaatctcagtgtggctagagaatggggaggggaagtggggggagggactggcaggggcccccagtgccatgtctggagtctttctctccaggacagtggaagccacagaaggttagaagtgggggaatggcaaggtcgtatctgtgtttacaacaattcctctggctcccagtgaggaatgcatggggggctggaggcagggaggccagttccctggacttggggtggcagtggagctggggagaggtgacagcttggccactgaaagagtaagagggagtttagcagcctgaggccaggtgacagacggaacaggctgtaagctacggacctttccaccacccaacagttaataaagagaggaggtccgggctgggtgccagggtcccttctgcacaatgggccatgccaactgggtaaacagaggtagatacatgatattccttaaaaacaaaatcctgattcattcacactccttgctgtttactggaggtgtttgttttttttctcctggtctatttcaggtttgacaggtttgtggggagagcagagctgggactccgtgccaactgggagggagagggactcatggggagagaaagggcctctccttcttcctacaggactagcaaggggtcttgggctgggctcctgcggaatgctcttgggcaaattgctttccttctctgagtctcggtccaagctctggctctgaccgtctgaaccctcccttttaaagccaaatattattattcttcgcccttggatccctgcttccaaatatgcttgaggatgtggtgggcaggggaggggcggggcaggtttgcagggaggcagtgggcagaagccacttccagagaaaggcctgatgagtcaggacctgtaggtggcattctctgttcaagaggggcaggcccagcaagtgggcagggagaacctttcctctctgctccagatgtagaccattgccaccctttgtccacagccctggcattttcaaccaggttctggggcctgagccaagaaaagggagtgggagcccctggtgaatagagacagcgtccagagtcttagaaaaagaacagatatccctctgccttgcagatttcagaaatccttgctatagaaagaactcttacaaatcaataagaaaaagatagacattcccacagaaaagcaggcagaggatataaattttaaaaaccacaaatggccaggctgggtacggtggctcatacctgtaatcccagcactttgagaggccaagggaggcagatcacttgtggtcaggagttccagaccagcctggccaacatagcaaaaccccatttccactaaaaatacaaaaattagccaggcgtggtggcaggtgcctgtaatcccagctacttgggaagctgaggcaggagaattgcttgaacccagaaggtaggtagagattgcagtgagcagagatcgtgccactgcactctagcctgggcaacagaacgagaccctgtctcgaaataaacaaaataaaaataaaacccacaaatggccactaaatgtgtgaaaagatgtttccatttactcaaaagtaacaaggggacatcaaaatggcctccagcgtgagggcaggggtttccagcattttagagttgagaaattctctgatgtcaaacttcctggaatccttcatagtgctgatgactatgtttatttttctttccttgaaaaaaaaaaaagggcaaataacttcattccttccccacccaaagactgtaacttttttttattacaataattgatttcttaacatatagtagagagagttgagaaagtttaaagagctttacaatctttccagagtgaaaaaaaaaaacaacaaattctgttctggatgctcaggctgcctccccatctggggtcccaccagtccatgccagggcccacccctccttccctgcaggaagtcctagatcagccatctggcttaggccccacaaggactcaccttgcttccttttgctcacactcacgcctttacctgtcacgccttctctgtgcctacctgttccagtgtttgaacaaggattgctgtatacatacaatggaatatatatacatacgtacatacatatatctataaagagggaaggtctcactctgtcacccaagctggagtgtagcggcgagatcacagcacactgcagcctcaaactcctgggctcaaggtcttcctgctttggcctcctagtagctgggactacaagcatgcaccaccaggcccagctaatttttttaaaaaattatttaacgacggggtctcattctgttgcccatgctcgtctcaaactcctggcctcaagcaatcctcttgcctcagcttcccagagtgctggcattatgagtgtgagccaccgtgctcagcctgaatatcattaaaaaaaaaatcctcgcaacaatttattcaactctaaaatgggctttatcattactaccccagaagctgtgaggacagtaggaggcagaaaagtccttggtgtgacacctggtctgtggtccatctccataaatggcagctcttcctgaaccttcttcaagcaggctccttcttgccaatcaggtcccaaggcatcatctcctcctccttcctagaccactttcctagatggcatcccaccccaaccccacttgtcaccctatcccatcttaatgtttattactctctgaagtcattttatttatttgttgtattttttcataagactataacctctatgaagacgaggaccgtgactttcttgcatactgatttatccccaatacctagaatagcatccaacacatagtaggtgcttgcatgtttattttttcactttaaaataaatggtggctcacacctgtaatcccagcactctgggaggcttaggcgggaggatcccttgagctcaggagttggagaccagcctgggcagcatggtgagatcccatctctatgaaaaacattttttaattagctgggtgtggtaacccaagggtgagattggaggatgccttgagcccaggaggccaaggctgcactgagtccatgtttgcaccactgcactccagcctgggcgacacagagagaccttgtctcaaaaataaaaataaaataaactttgttgaagtataattttgatataataaaatgcatccgtttgatgcatctgtacagtttgataaatttagataaatatgttctcttaccaacacctcagtcaagacataggaccatttttatccccctaaagttccctccagatttttttttgccatcaattctccttcatcccatccctagacaaggcagtttttttttggtgtgaaatgaatgaatcttgaattgtcagggactggccccagatttgcggagagctattcacatgtgtgcatagcaccctactgttcacaatgcctttccactttctgtttttttctttggttttgttttgtttttaatggagtctcactctgtcaccaggctggagtgcagtggcacgatcttggctcactgcaacctctgcctcccgggttcaagcgattcttctgcctcagccttctgagcagctgggactacaggcgcgtgccaccatgcccagctaatttttgcatttttaatagagatggggtttcaccatgttggccagactggtctcagactcctgatctcgtgatctgcctgcctcggcctcccaaaatgctgagattacaggcgtgagccattgcgcccggccgcctttccactttcatctcatgtgcctctcacatatgaggccatggatgctcagatggattaggtgacatgtgacagaaggtctccaaagcaagaggagaccttttggatgctcaagttgcctccccatctggggtcccaccctgggccagggaggaacccgtccctgggccagggaggaacccgtccctgggccaggggcctcacatggtaggcaggctgtgggtgttccaggcttgggtgtgccacgaagcctggggaaaggccactgtggccccatctctaacccccctggcctaggcctccagcccagccaagaagatgcctctggtgtccagatgccagctagctccagctagctcctccctgggcagaacagaccctgcagtttgggctatgagaaaaatgaaaagaggttatcagcatcacttgcttctggttgctcagagagaatcagacactgggtgccaggagacttggcctttggccaggttctccctctgcctcactgtgtgcccttagcaagtcactttccctctctgggcctcagtttccacctctataaaaggaaactagtgatccctaaccagcatgacttcaactccacctgatgatgactctttgacgcatgaatgcatcccggccctcaaaggctgggcccctgcccatgctgtccccactccctggaatgctgtttctcagtatctgctgtcaaaagtcttgtttttcaacttccagttctggtcctaccccctctgtgattttccttaaaacagaatgttctgctccttcctcaagcttctctaagctcttgagggcagggactatgaataatagaatgacacgttctgttcattgagagatgatggaccctggtgccaggcactatgctgggcactttgtgatatcatttaaccctcccgcaaaaagcatcattctcttttgacagatgaggtagctgaagttcaaaggggtaatgccacttgtccagggtcacagaggggagggcagcttgggcttccttctcttttcacccccagcatctagcagagggcctggcacacaggtgttgaccacccattgctgaatgactggtaagtgactgaatgcatgaatgaatgcctgcatcactttaatccatttcaaacctacctcctgtggtgtgcacaggcctgaagtacaggtgctcagcaaatttaactgttatcatcatcacttcctgccttatgccacagtcacactaagagctgcccaataacaacgtgaaatgcatgagagaagtggtgagtgcttagttaccaggggtcaacaagcagaaagtggatggccttgtcccagtgcagatcaggagatctgagcaccagcagccaaaggattgagatctggggatcccactggttaacctgactgtctcccctgccagcttgggaggtcctgaaactgaaacacattcccctggcactgcgacccacccatgcccagccccataggctggtgcctgtcggtctccgggttttgattctggtagtcttttgcaaactgtaaagtgctactgctttttccttttctgatttgctctgtcccccaagccgcctcccgagtgaaatgcccatatgctgagcctgaggcaagcccgcctggcactggggcgggggtgccttcgggcccgagccttccccacccccttcctatagctgttgtgcaagaccagcgggcacaccttctggggcaggtcgaatcaaggccagggaacttcctgagcgcgggcagtggcgggcgggacttgggggggcagggggcactgttcagggtagaggagggggcgaacgccgaattccggcccgtaggtccaggcgtcccctgccagtgccccacatcctcctcggcgcgattcttttcccgcgcgggcaaggttggggaggggaggggggtgacactcaggctggagtcccccagagcacccccagtttttcagatgtccccaccagccccgtctctttctctgcttaggtacagggcgggtgcgctcttcgcagtctctccgcggtctccctttctgggaccttctctttgtctccttctccagggcggtcccggcgtccaccgcccctgtgccccgcccgccggaggcagcggagggggcggggcatacggggcgggccctggaggggctgggtggggcgcaggggggtgcaggaccgagggcggggcggggcggggcggggtgggacgcggcgggcgcagggcagcgggcggggagggggcggggttggcctgcgggggcgtggtctggtggggcggagcggggcgccggggtgcagggccgagggcagggagggggccaaggcggccggctggagggacggggcccgaccgggagcggagccggagcggaagccgcagccgggcggcgggagcggcgggagcggcgggagcgggggaagcagggcgggccgggctccatggcgccagcggcgtccgcctgagcagcgcgggcaacagcggcggcgtcggccggatcgggccgcgacacctcctggccatgggggacgtgctgtccacgcacctggacgacgcccggcgccagcacatcgcaggtgagggtcgcgccgcgccacgcgcgcccaggggcctgccggaacccccggaccacgcccccgccccggccagcagttggcgccggggccgggggctcgggggagtcaggccgggccggtgggagctgccagggagcgtgccccgcgtccgagctcgttccctctgagcctgggcgccccttcccgcgctcttctgagcgccacctttcccggctcaaggggactcggaactccttctctcccggaaccccttcggagcccgggcttggcggacccccagcccacgacccctggccgagctggggcaggggtcgcagcctgctgcccacccttggctgtccccgcccagaagcgttgcaagcccatccgctaccagctttgggatctcccagacccagccagctcgcgctcaccttcctccccagccgtcccgtccccagctccgccgggccccagccctggtacacgtggcggaggcttcctgaaggacgcgcccatgaaggcccgggactgattctggggagtggggccagggatcgatggggcgccccggaggcggtggggttgcatgtcctttggcgcagacagcaggctgcccctgctagcagcaggggcccagggaccggtcaccagagtggggggccctcagggccagtcgccagccccttcaaccctgttcttcagccaaccctactctcagcctattactgcacagtggccacttctcccagggacagctgtccccaaggctcctggggaagccggagctgcagagggggcctgggttccttttccccacagactctggagaacagtgagataggatgaggatctcggctgcctgagaaactcctctctggccgatctctcctggctggtggagctgccctgggtggaatcccagcatttgcttcccagacatctgtcctgtacaccttggttttctcctttttgaaatggggtcagtgatttcttccttattaatgagttgttgggaggcttacgtgaagtaactcatgtggcttgcttagcacagagcctggcataggagaggcacttgtatgtggggtgacggttcaggtgggtcgcccctcgctgtctagtgggccctgagcaccgcgtccgcctgcacttatttttgtgtcctgtagaatttcaccaccgtgttctccacgctcccttgagagcaggaagccctgagagcagtggccaggtgtcctttaactccatgtctccagggccgcacccatgctgggcaccagggaggtgctggggagatctgccaagtgactgtggtcccgggccaagtcccaaggccagagtccctcccttgtgccaggcctggggctggctgggcacaggggtgactggggtgatgtgaaaatgaatcggaccctctctagcctctgaccagcgtggggttaagtcctggaaagcctccttatccgaccaggcctggactgtgggaggaggaagggccagggcggagtcttcctgtcccctccctgtcgcagcaagctcctggggctctgtaacagtccctccattcaggacctcctgttgaggcccctcgaggggcctgggtggggtgtgccttgcattcggtggggtttttcctctccccatactcagtgctgggcctccctgtcttcccgtctcctgggctgagaattgccagcccaccctctctcccctggcatgttacaggggaggggactgagaccacagaaggtgaagtgtcctttactggagagggttggatttattttctggataccaggctgggtggaagaaagttgtgcccactcagagcctgctggtctctctcttctccacacttcagtgctatttataatcctctttaaatgcctcgaattcctggtccagactcacctgaggggagttcctgatgtgggggggtggggtgttggaagggggcagcggggaagcctcccagtctccccagaggaagtgagctgcctttgaaatctctgctggaagggaatgagggcgtgtatttgcctcctccagtgatccaggcaccctcctcaccccacccaaggagcagtaggtactctcaaagctggcaattaaaattccagaaccctccctacctgaggccttgttctctgccccagtagaaatgtcagagttagagacatcccttcccacagtgctctgagttcccaggcctgttagggttccaaggtttgacctgcagctttgtgcccgccccaagcaggtgagcaggtgaatgccagcctgcctgcaagtcctggcaaaggtcaagcgtgctcccggccacggtgctgttttgctgccacggcacctttcatcctgggatttcaaagcccctggcaagcagaggcttgtttccacaccaggagccccacggggctggtggcaggatgactcctgcctccttacacgaggcagtgtgccgtgaggaagaatccctggcctgggatctgggaggcctgaggatccttgggtaggccacttcctctccctgggtctcagtttccctagttgtgaaccgaagtgggtgggccactcgatggctgaagtccctttcagctctgagggcctaacaatcccaaattttccccacaaatctcccccagactgaagccagctcaaggtcccagtataatgcctgcaaccttggagtaatatctttttttttttgagacaaggtcttgctctgtcacccaggctggagtgcagtggcatcatcatagctaattgcagcctcgacctcctgggctcaagtgatcctcccacctcagcctcccaagtagctgggactacaggcatgcgccaccatgccgtgctaatttgtgtgtgtgtgtgtgtgtgtgtgtgtgtgtgtgagagagagagagagagacagggtctccctatgttgcccaggttggtcttgaactcctgggctcaaccaatcctcctttgggagccttggcctcccaaagtgctaggattacaggtgtgaacttcccgcccatgaactaacatctttttttttttttttttttttgagacagagtctcactctctgtcccaggctggagtccagtggcacaatctcagcccactgcaacctccacctcctgggttcaagtgattctcctgcttcagccctctgttacaggtacacaccaccatgcttggctgattttggtatttctagtagagacgggggtttcaccatattggtcaggctggtctcgaactcctgacctcaggtgatccaccctcctcagcctcccaaagtgccaagattataggcgtgagccaccacgcccagccaaaaataatagctttattgaggcgtaattcacctaccatacaattcagccacctaaagtgtacacttcagcggtttttagtatattcacagaattgcgcaaccattgccaccatcaatgttggagcattttcatcagcccggaaagaaatcctctactccttagtagtcgctcctgtttcctcctagtccctcctaaatctaggcaaccactgaacattttgtctaattgcaaaagtaatgtgtgcacaggccaggcgtggtggctcacgcctgtaatctcagcactttgggaggctgaggagggcggattgcttgagctggggagttcaagaccagcgtgggcaacatggcaaagccccgtctctagtaaaaatacaaaaaattagccgggcattgtcgtatgcgcctgtggttccagctaattgggaggctgagttggaaggattgcctgagcaaaagtaacacatgtacaaacaatttaggagggtaaaataaaacatgaaaacaccctccatctttctccgttaaatcccacttcccagaagaagtcacttaagtgtggtgtgtcaccatttccaaacctacctctctctgtacatgctcataatagcttggtttataaaaacagattttttttttttttttgagatggcgtctcactcaggctggagtgcagtggcaagatctcagctcactacaacctccgcctcccaggttcaagcaattctcctgcctcagcctcctgagtagctgggattacaggcgtgcaccaccatgcccggctaattttggtatttttagtagagacagggtttcaccatgttggccaggctggtcttgaactcctgacctcaggtgatccacccacctcgacctcccaaagttctgggattacaggcatgagccaccacgcccaacctataaaaagagatattactctatgcttctgtggtttgatttttttcacttggtaaattggtggacatctttctgtgtcagaacacacaagactacctcattcttttcttggtgagttcgtttctgtgcatggatggtttgtctacccagccctctgtgaatgggcatttgggttgtttccactattttgctagtattcacagtgctgcttgaacctgctggtacaaaccctctgtaatattccagtatcagagaggccctgaaatggaactcctgggtcaccttttttttttttttttgatacagagtctcattttgttgcccaggctagagttcagtggcatgatctcggctcattgcaacctccgcctcctgggttcaagcaattctcctgtctcagcctcctgagtagctgggactacaggtgcccaccaccacacctggctaatttttgtatctttagtagagatggggttttaccatattggtcaagttggtctcgaactcttgacctcaggtgatacatctgcctcagcctgccaaattgctgagattataggcgtgagccaccatgccctgcctgggtcaccttttgatagatggacacatagcctttaagaaggcagcaggcgtttgacactctcctgctaagatggaccttagcattgagcattttcatccttttgacaaccagatatgagaagaagggtgtcttaattatttattgagcaaaacaaataatgcttctttccaaagtgattttaaaaacttacctctctgctgggcgcggtgactcacgcttgtaattccagcgctttgggagacaggcaggcagatcacctgaggtcaagagtttgagaccagcctggcaaacatgatgaaaccacgtctctactaaaaaattagccgggcctggtggtgcgtgcctgtagtcccagctacttgggaggctgcggcacaagaatcgcttgaacccgggaggtggaggttgcagtgagacgagatcgcaccattgcactccagcctgggtgacagagtgagactctgtctcaaaaaaaaaaaaaatctacctctcaacatttgggaagtggctgtagatgccaagagtgaagggatggaggggttccaccttctgccacccctcaccctgctgtgtggcttcctctttgctcccctggactttgcagagagaccaggctggccggaagcagtgcctgggcctgggccgctgcccttagccaaggtccgggtcagcccctgggggcgaagtgtctggggatgatgctgtctctctgttgggtcttatataacatgcttttgttggctttgaccctgccttcccctccatccagcctcctctagtccccctgactctgttccttttccactgctggggcctgagtgccggcctcgcctactcagagctgctccagcctcctcggagcctctagtccttcccacacacgctgccaaagggacctttctaaacccacgcggggccatggctgccctccctgctgtccaaggagtgaagcggaaaaacaggactaggaaccactcacccgccgtcctgcgataaccacttcatcctctgggagtacttcccatctgtgtcgatcattacactttaccgggaccatgactcaagtttgtgtcttgcttctttcactacatgatctatagtaaacatctctcccaggtcattaaaacctccctggaagcatccccaaaggctgcattttattccatttgaggacagagggtcactttcccagctttttccctaatgctggacatgaggttgtttctcacatgttggtttgtaggggcaaacagagccactgtgtgtgtttcttttctggctccagtcaacttccctgtcgaagaccgattcatctcccagcccaactcttcccgtgctctgcttccgccaacctgggcatttagagggaggctccttcctgccatctctgagcatcgttcggggctagtgggcttgaaggggctgcctgtgtactggggacggggactgatgaccatggcctctgggtgtgtggccatagagtctagcctgcggtgtgtaggaatggatatatattttctgtctgaagacatggttgatagagcagggaggggcagtaatcaggctcggagtgataactgtaaacattagcaacggtttaactgagcacttgctatgtgccaagccttcctttgtctgtatcatcttattgaattcccacctcagtggcaggcctggatcggatagtccaaggccttagctatttaaaccacgttctgctattagtatgtcatccgtggtgcccagactgggcagggggacactgaaaaaggcctccaagagaggtaagctttcggaggcggggagaggaagtgggaggaggagccgagtgggaatagagcagcttgtgtcagtctccctcccataggttgcacaaatctatcccacccgtcattactcagtctgagactcacagcctctgaccagccccattctccgtccctgcgcccccctcctccttccccgcgggcagagctcatgactcactgcaccccgggctcctgcaagcatcatcctgcggttgcagaaattcctgcactgctttttccttcccctgccccaccccatccacttctgtgctggaggaagaagggtattctgtagacgctgctgggcagaggtttaaggaaggagtccgggcagatgcctaggtttaaaacccgtgagggtggagcaaagccattctcttctcctggtagaatcttagggcctgagtcatggaagggtacaatcttttgatctcaaaaattttaaaactggaagaacaggaagtgtccaccccctgggactggtcccatttttttggagctgggctgcttctggcccacgaaggtgaaggggcctgcctggtgacgtggtggatggtaagcctgaagaagcagggagcccagaggttttggggtaaggctttgcagtcagactgggtttgagtcctggctctgccactggatggactggtgttcgggggcaagttagtcaccctgtctgagtcttagagccctccttacatgaggatgagagttctggcatctcaaggtatgaaggtcaagtcccctggtcagcgcagaacagtgttggtgggaggtgacaatatgtgagtggtagctgttatgattgtgactttattgagctaacttgacacccagggagatgtgtctggtctgtctgtggcctcgtgcatcccctgctccctgccatgtgctccaggaagttgacatgacccactcctttcctaagcagccctaaatatgagaatcttcttcccttccaaggtcagaggagcaccagcctatggccctggacccctggggtattcagcgagttcctggaggacggtgggatggggctgtggttccagcaaggtcagtcactccgcagcagcatccactctgtgcctggcatttggcagtgcacagaggaaaagggttagaagatggatgggaacatgctccctccttgcccacccatgtgtcaagaactagacttgtaagccttaagcctggtcccattgaccacttgctgtgtgactctggacccaatggccatgcctctctgtgccttttctccctgtctgtgacctcaaggccagtatctactcttgggaattctctgcctctgaaaacccttttgtaggggtctcaagatgccttccaaaggcagggctggtggcttctatgtagaaatagaggtgcatgcctgtgagaccatcaaggggtgtgatgagctctggcccccaacacacgtagtccttatttcttgtatgaattcaatcaatagttattgaacaccttctgtgtgcccggcgctgtgctgggcaccagggacacgcagctacacaatcacatggtgtctgcctgtgtgtgcttcctggctggctgtccctcctcagggcaagcaatgttcccaaagggaaaggccttccttgggaaggtgtaagggagactggcctggggtgggccagcctgctgggactcaggatgggggaggtagagggaaacacaaaggctggtcttggcgaggaagggcctttgtccttagggtcccagggaggccttggaggcattttcaggcagaagtggcaccggtgggtcagctgtgagtgagtgtggatgggaggaggtgaaccccatggtgagagggactggacctgcgtgtgtgggggtcgggtgcaatgagggatatgtgtgtacagggtgggtggcgtggccaggcctcagtgatggtgctgtgcagggctggggcgagctgatgtacgtgactgttggctacagggaaacctgtctggattctgtaggttgttttatcaaggcagaccttcaaccactggtcttgcagcctctgctcccactcctctagtgacaggaaactcagtcctttcccaggcaaccctgaaaatgagaaccttcttcccctccaagggcagagtagaaagaggccgggagtcagaggacctggtttgagatgctgtcaggactgccctgtcatttggcagctgccctcccttctctggacctcaaattcctcatctgtaaagtggacacagcagtatcccaggcccctgaggctgttgtgcagggtcggtgagatgatgtggccttagctctttgtgcttagggagcatcggctcctggttcatccactgttaccgttctatgtggttcacataggacattggccaagggaggccctcctcttgcagatcagaagtgccgggtgtgggtcagggtgctgggtagagggtccacgtgcaggggtgggggcccagggagtaactgggcatccaggaggggaggaagaatgaactgtggtttgcaaagtgcagaccccactttcccacctgcccatctgtggccaagccaactgcagctgctgtccatctttcccatgccccatgctgagcagaactatttgtgtccagccgaatttgtgaagcttagcaccttctagaagaggagtcccttgggaagaagctgcccacccactcgtgctccagtcacctctgatttattccacctgccaggaaccactggtgggtgcgggctaggaggcaggctccccaggatgggtgcctggaggcctctgacaagcccttccttttctctgtgcctcctcctcactttgcctatctgtgcaacgggcatgcacttccagctgtgaccccttaggaacctgtgggccttaggctgcactgaaggcacagagcaggtgcagcacctccacattgcaggaggccatcttgccgttgaaggaagagcttgctctgaaagctgtcctgttcctggcctgagctgggaactggggacaaagcagtgacatgagccctgatctcatggaactcatgccagccaagaaggttccatcaagctggatgtgctgtggctcatgttacaaagcccgtggatctttgtttcccagagtgtatgttggtttcagcactcagtcggcccatctcaagaggcagcgtgtctggctttgacctggtggcagtatgcttctgtcactgaaagctgtgtggccttcggcacacagctctcctccttggaggtccagttgtcgctaagatgggattggtgctccctgcctttgggctgggtgaaggttctgggaggtgcactgcgcagttcctggcctgtgcagggtgctcagtaaatggcaattgcgttttagctgaattcttagggaagctgtgtgtcctttgcccggcctgtcagagatttaaggggtgattcaggcatctagaggaggagggagctgacaattgcacttctgttttgctttttgtttttgctttttttgagagcagtattctctgggaggcgaagggtagaaaagagagctgagtttgagctttggggtgggcaggcctgatgggctggggaaggtgtgtgcctctcaccctaccacacctcccctagccctgccttgatttttgaggtgctgatgagaagtgtctgcttttctttttcaggcccagacccttcctcgtcctagttctggaggaccccatgagctcctctaaccaatcccctcctttttctcatgccccagtaaactgaggcccaggaagatgatgggacatgcctatgctctcaggggcaccagagcttggctggaacccagggccttgaccccagcatgaagcttttccctctccgacttcgtactcccaccccccgcacccgtgcagggccccagacggcaagggatggtgagggaaggaatgattgggccgggtggggctgcagaacttataattatgaaaactgggtaaacaaacaagctctctgggagagaagcaagccctgtgcgggcctcacagatgggcctgtgtccgaggagacagcccaggcccgtctatgcgcagacagtgaggggctgtgttggacttaaaaagccaaagccacactcccctcccacccccactcctatatttcaggctgccaggaaaagaggagggggaaggggcagccctttcttccaaggaggtaggggctgaccccctaggactctcctggggtcagccctcctggcccagcttgggacagtcacagctcactgtgtgaccttggtcaaggggcgtctctcctctgggcctcagttccccatctctagagtggaggtcaccccatctctcaaggagggtggcaggatggggaaagatttgagccaactggttgaatacactgagccctttcactcaccctgacccgaggccaactgggatctcagaaactcttcatttctctctggccagaggcaggggcccctcttggagcagaggagtgactttctcagtgacctgagagccggcctggtcctgggaggccaaacctccaatcctggcctgactttagcaggctgcccagctcagctttcctgtcttcctgctgagattgtggcagaatccgagaggagctgtttctggtgcctgccctgcaggctgggggctgggcagcttgccctgcctggaggcccccgggtggagcctggcagacttcctgtgcaattggggctgagcccccgccctccctcccctcttcctgcagtcccctgtgtggcttctgggagtccagctctgtagatgggaggccggtcctgcttcagacctctgtggccttgggtgaactcctgcctctcctccaagcctcagtttcccccatggttcaatggaggggttggataagagcctctggtagtagagtgaccttgctactaaccatgtgtcaccctccttcagactgacccttccaggctgtcctgtgccctcgaggtcaagcccagaccctgaaatgccctcacagaccaagccctgcagccagtagccccactcctggtaggctggatcaggctcttcctctgagctcccacagccccttggccacccgtgtgtacctgtagcccttctcacatggttgtgattcatttttgtttttgagacagggtcttgcactgttgcccaggctggagtgcagtattgcaattatagcttactgcagcctcaacctcccgggctccggcaatccttctgcctcagtctccccagtagctgggaccccaggtgtgcaccaccacatggggctaatttatttttatattttgtataggcagagtctccctgtgttacccaggctggtctcaaactcctgagctaagccatcctcctgcctggcctcccaaagtgctgggattacaggtgtttgagccaccacgcccagcccgtggttgtgattctaattcccatctgtgatatgagtacctgcgggctaactcaccatgggctcccctgaggtggacaggtggcctcacagctcagacttgctccaccagcagctgaacaagtaccctaggtcaggctttatgccttagtttcattggctgtaaaatgggcatgatgatgcttctactccactggattgtaaaggttattaaattatgtgtgtaaagcacaagaaatgctgaggagtcaataactgtaatgaacatttattagtgcaaattgttttagttccctagcaggaatgaatgaatgaatgaatgaatgaatgaatgaatgccattgcaaggtcctacatcctgggagcatggggatcccaaagctctctggatgaaggtcctggtaggtgcagaatgtgtgtgtgtgtggttggtgggggttggttacagaggggcagggcagatgtgggaggggcttggggtggtgacgtaccccctgcccttgtggaaggagtggtttgggcccctccgtgtctcagacccgcaggcacgaagccatgtggccatccacaacttccttcctcctgcctgtattcctcgaagcgtgactcactggctttgagcccttcattcttgtccttgagccccgagggtgaggcgggtagagtctttcttggaagggcggctctctctctgggttcctgtctattcctggcccttctgcagcttctgagcatgacaggcagggatggaggggtgcgggtagggtggggtggacacctgggccctggtcctggtggccccactgaccccatgtgtgtcaggcttggggtgggcacccactgagggcccacccagggcttggatctgagctggtgtggctgaaacagcccagtcaagctcacctgggccctgcccctgtagagctcctgtctggtcaggagacacacagaacaactaccactcagtcattaattaaaatcattaccggagggcgaattgctataaagaaatggccactcttccctgggagctcacgtgtcctgggatctccccagcagtgcctgtggtttgctctcctgtcacagaggaggaaacacagcccactgagtgggaaagggagcaggctcagctctggggcaagtcctgtgcccacctggggcctcaggatctcgtcacccatcttagaggtgtgctgttcacgtgaccctcctgccttggcctcccaaagtgctgggattacagacgtgagctgccgctccccactagggaatgctgttcaggaggcccagggtccgccgctggccccccatggttctgggtgggcgggctggcttcggggttttagcctggggactgtggaactgcagcgagagctgggtttgttgtctttaaatccctcctttgtgtgtccctagacagaaaccactgtgactaaagtattgggatcttctaaaggctaggcaggaaatgggggctggtaagggtggtcgtcccccttcccactccctccaccaatacacaggacagcagaaaggtggcccaaagccctgggagaaacccaccccaacatttcacatctagaatgtaccgcgttaggtaacaaaatggttacattacagcatgggggatggaatggaaacaatgtattaacaggcattgttcaatggcataatatgaagccattaaaagtgatgattcagttttgtatgtctgaaagtgtgtatgtttgtataggcatagaacaaaataaggaaagaaattcaccaaaatataaatagaggttattttggagtggtgggataatggattattttaatttttttattctctcctgatttttgttttttgttttttgtttttttacagtgagtggattaaatcaaaaagaataacctgggtgggtgcagtggttcaggcctgtaatcccagcattttggtggctcacgcctgtaatcccagcactttgggaggctgaggtgggcagatcacctgaggtcaggagtttgagaccagcctggccaacatggtgaaacccccaccccccgtctctactaaaaatacaaaaattagccgggcatggggttgcacacctgtggtcccagctactcgagaggctgaggcaggaggattgctttaacttgggaggctgagattgcagtgagccaagatcgtgccatagcactccagcctgggtgacagagcaagaccctgtctcaaaaagcaaaaaaaaaaaaaaaaaaaaaaagaaaaagaaaaagaaaagaataaccctattgactgtatttagtggaacaatttgattcctgtctgacttcagaatctaagccattctggcccgactggagccccaagggggttgcaagcacagggcaggctccggagcggggaagagggaagagaaaattctggaagaggggtgtttgagctcaatcttggaggacaggagggatttttaaccagcagacttggggtaagggtgagtggagggcatggcctggcatagacccttgcttatccaaggcagggagctgagcacagccttgagtgccaggcaaaggggttggggaatggagagtccttcccatgaacacttgttagctggactttagaatgaggactcagtttctgtgatgagggcaaggagagcaacaaatttgtgttaggtaggctctgtctgtgtgcccagcctctgagcccccagtggctgtgagcagataggactgtggtagtttagcccagagatggcagatggattccacaaataaagagtctctctccgtgatgagtgctgaaggccgggcgtgggtgggggcattggggtggtgaggagtggttgggtaccatccaactgggaaagcctatgacccatcagacctccagtccggaggtgtccctgctaagtaaaaaaaaattagccaggcatggtggcacaagcctatagtcccagctactctggaggctgaggtgggaggattgcttgagcccaggaggttgaggctgcaattagctggatcatgctacggctctccagcctgggcaactgagcaagatagggctccaggccagacagagctccaggtccccagggtaatatgcacaggatgctggtacctggcatagaacttgggtggccagaagcatgcgctgcacgaggctgagcacgaagaccccattctgctgtgtttagggcttcccttccgcctgtctccatgatgacctcagctctctgctttcccttacccatctgtagcacagggatggttgcagctaccttcaagagggttgttgtgagcttcatgccagggccacccctggtacctggcacacagcaaatactcaggaagagtttccgtcctcggggttcagtccccagccagggaactccttccctcctggaggagcctcagcagcctgaacttgatggccaggatggtattatatcaggttgcttggcggtgagctctggcctccccctcagacccactgtggctcccacctggcagcatctgccaaaggtcaggttctcacagctctggaggtttggcctttcaactttgagcttccccagtcttccccctttattgtttttcaccttttattattattgttacataagcaatagctagtggtcaaagaaaattagaaaataacagataagtaataggaagaaaatgaaaatcaccgataatcctaccacccagaaaagactttcaggcaccttcctgatacataatttgttcttctaccttaatagtgagtagtgggcctcctccttgtgaatggatacagaatattccattatggctgagcaaggaggctaatgcctgtaatcccagcattttgggaggctgagacaggcggatcacctgaggtccggagttggagaccagcctggccaacatagtgaaaccctgtctctacttaaaatacaaaaattagccaggcgtggtggtggtggacacctgtaatctcagctacttgggaggctgatgcaggagaattgcttgaacccaggaggcagaggttgcagtgagctgagatcacaccactatactccagcctgggtgacagagcaagactctgtctcaaaaaaaaaaaaaaaaaaaaaacgaatattccattacgcctcaatagtctatattttaacttactcagtcaaagccctattgccaggcagttaggctttttctatttttcttttttgtttgtttgtttttgagatggcatcttgctctgttgcccaggcttgagggcagtgtcaccatcatggccaattgcagcctcaatctcctgggctcaagcaatcctcccacctcaacctcccaagtagctgggactacaggcttgtgccaccatgcctggctaattttttaaaaaaattttcgtagagatggattctcactttgtcatccagactggtctgaaactcctggccttaagtgatcctcctgcctcagcctcccaaagtgctgcgattacaggcatgagccatggtgtccggctctattttttgttgttgtaaacagtgctgtgttggaaagcttaaatcaattaatgggattgagccattgattccgcatggtttgagagccatctctgctcagtgtcaggctgtgtgctgggactgggggtgctgggtggggaggcggccatggtcctcaacctcttggggacccctgtctggggaagacaggcccagcatggcacgccagcagaggtgggggtttagggcatctttgggagccagggagcagccataacccagacctggagagtcatgggaggcccagctgaggacacctgcagctggtgacctgagggtggggcaagccctgcacctgctgctggctgagctcatgggaggggacctctcaggtgagccacaaaggatacaggaggagagagtttcaggcagagggcaggtctgcagaggcccagagtagacagagcatgggcattgagggaaccaaaacttcccagagatcggtgctgtggttcttgccagcctggcagcagctcccatgtgcatgacactgtggtagttcttttctttttctttctttctttcttttttttttaagatggagttttgctcttgttgcccaggctggagtgcagtgacgtgatctcagctcactgcaacctccgcctcctgggttctagcaattctcctgcctcagcctcccaagtagctgagactacaggcatgtgcaccacgcctggctaattttgtatttatttatttatttatatttttatttatttatttttgagacagagtctcgctctgttgcccaggctggagtgcagtggcgcaatctctactcactgcaacctctgcctcttgggttcaagcgattctcgtgcctcagcctcccaagtagctgggattacaggtgcccaccactgtacccagctaatttttgtgtttttagtagagacggggtttcaccgtgttgcccaggccggtcttgaactcctgatctcaggtgatctgcccatctcagcctcccaaagtgctgggattacaggtgtgagccacagcaccctgccaattttgtatttttagtagagacggggtttcactatgttggccaggctggtctcgaactcctgacctcaggtgatccacccaccttggcctcctaaagtgttgggattacagacatgagccaccgcacctagccggtagttttttttcaaagtgccgttccatctgtccctttgtgcggtggggatcactggcttcccttttcttaatgggaacacagaagcagagtgacgtgcgtgccccagggaagtggctggcggacccaggcctttcaccggcccagcacacgggacagggggttgaagtgcaggatccgccagctctggtttcccggctctttgcaggtgctggatcacttgacaggatccaagcaggaagaggacgcggaggatctgagcttaggtgaccgccttagtttccatgaggaggtagtgaccttttctgctgctgatatgtgaccttggcctggcccagccccaaacccagccctatatttgcaggaagggtcctgcctcttgggccatactgggattggagaggccctggtttatatggaccttgggggctgggaagtgtctgtccccaagctggagttaacctttctgggaatatgccatcctcctctggtgtcttaacatgactgggagactgaactgcagagctctggtctaatgtcacatagtcaggggataaatatttctgtgcaaagtgctgtgctagatgctgggcatatgttatgagtgagacagacagggtccctgccctcctagggcaaatggagatggaacaatgaattattaaagcaaagttgtgctaatgactaacaggggtctgacctgtgtgagcgagctggcaacagtcagggacagtgcttttcagcaccctaggctggcagttaggactcaggtcagttctatcaaggcttaatggtgggctcctctgggcttcccaatgtgtcaggaaggagcgttgtctcatgtcccaggtggagggcatcagggcgttgagggtccagcaccatggtgtccagtcccttcacggtacggggaggagacagggagccaggaagggtggggggcttgtccagggtcactcagcagcagtcaggtacatggatttggggcccagtgctcttagccctgtatcaccaccccatttcactggccagtgatggggagacactgaggcggtccccactcaccctcaagggactcccccggggaagcagaccaagaccacagaggctgttggctgcgcagggtctctcagggcgcacaaatggggtcacgcaggcacctgggacagagagtgggaggctggcggggctgggaggggagccgttctcccacctccccttctggccccctctggagcctgaggacacctgcagctggtgacctgagggtggggcaagccctgcacctgctgctcgctgagcttagagtacagaccaagggagtcttgttatttgaataaactttccttctatccatgtaaagggtccctggcattccaatctgggattgggtttcctctggcccagcagcaagcacacgagtggattttcatattggctcatctttcttgttctcttcttccccttctttccctccctggctttgagaaggcagaatcgcccctccccagtcccactcactgagaggaccctgcaagccagaagctgcaggcagcagcatgcatgtgtgtgcacatgtgtaagtgtgcgtatgtgtgtgagtggatgcacggtgtgtgagtgtacatgtgtgtgggcatgcacatgtgtgaatgtgcgtgtgtgtgcctgcacatgtgagtgcatgcgtgtgggcgtgcatgtgagtgtgtgtgcgtgcatgtgcatgcacatgtgagtgcatgtgtgtggcatgcatgtgagtgtgagtgtgcatgcgtgtgggcatacacgtgtgtgtgaatggtgggtgagcaggggtcacgaggcaacttgggaagaacctgacttgggcttagggaaaggatattagcagtagagggtgcttggctgatgagatctgtggggtttgtgtatccgagtttagtccttttccattggggttgggccatggtgactggcacttattagctgttagttcttattggaacagaagctggcatttattgggctcttcctgggagtcaggcagggtgacaggtgcatctcacacatcttatttagtcctcacaccaactcttggaggtgggtgctctttgaccctccagcctctgcttacacacctccagtgatgaggccttccctacccgccagggtcccttatcctgggcatctgaggccgttagaaagcccttgctgggatcttgtgtgtcttctgtggatgacttgagaatgggctctgcttggcaatagggcgtggctacggctggacttccccagcgtctgttttccagggaactgtccaactctaaggtttggggagaggaacaagtcctccctcctttccctgagcagcccctatgtggtacttagcccgtcacagcttcattcatcacataccaagcaagtctgaagcttaatgttgaaaccctagaggtattttcattagcatcgatctggatgtcttagtcaatgcaataagagaagagagaaaaaaagagaagtacaaatgcaagacagcgggaaagccctcatggagttcagggactggtgacaacaaagcactgttggtctttggacttctccaccccctaaggctgcctacaggaagcagagtcttggagagaccagaacttgcccagggccacacgtgagttggcggcagagctggacgaggactcagggcccttgattttcccaaccagcatctctggtgatggatgcagcagctaagggagaggcggcaaggccagagtgttctccatgccagtgtcacagagcaggggggctgtggtcggtcgaggttctcaggggtgcggtacgtttgggtgttggctttcagaagtcttcattgatgtttcttgctccacttctccttcctgatgaattaacctgagagatgagggtccagaaagattggaccccaagcatgtcaccttttaatctcatgacccaccagctgagggaccagggaggtgctgttccagtcaccctttgctggttcccattgcgtggcgtgaaacatgggacagagaactgccatgagcactgatgagagatgccactgggcaccctgaccatttatgtcctggccaccaatactgggacagatggagctccttcgagaggttccatcactgccattgataacaccagcccacatttgcccaggctctgtgggtttattcatttcattgaatccttatgacaccttgcaagatgggggatcgtaaagttgctgggttttttttgtttgtttttttgtttttgaggtggagtttcgctcttgttgcccaggctggagtgcaatggtgcgatctctgctcactgcaacctccacctctagggttcaagcgattctcctgcctcagcctcctgagtagctaggattacaggcatgcgccaccacacctggctacttttgtatatttagtagaggcagggtttctccatgttggtcaggttggtctcgaactcccgacctcagatgatctgcccaccttggcctcccaaagtgctgggattacaggcgtgagccaccgtgcccggtggtgctgttttttgttgttgttgttgttgttgtgttttttgagatggagtctcgctctgtagcccaggctggagtgcagtggcgcgatctcagctcactgcaacctccacttcctaggttcaagcgattctcctgcctcaaccttccgagcagttgggattataggcatgcgccaccatgcctagctaatttttgtatttttagtagagacggtgtttcaccatgttggccaggctggtctcaaactcctgaccttaggtgacctcccaaagtgctgggattataggcgtgagccaccgcacctggccaggttgctgttactcccatgttacagctgaggaaacagaggttcagagagaattgagccatgtgttgctgaaagtcctatagccagcaaagggtggagttaggatttgaactgagatctggttccaggaccttgacactgcactgttgaagggtccttcttgacctaggacgtgctgataaatctttgtggaatggattaactctttcatgcctgtccgaatcttggcctttctcgggtcttctgcttggcacacactcccttcccggtgtcctccctcccctagcagggactctttgtgtctcagctgctacctccctctgggaggcttccgtgaccctgcaggcttggtcagtcaccttcctgggctcctgtgacctcctgtgcttctcccagttggggctcctagtaattgtagtttttgttgacaatctgcctccctcattagggtactctctcctgagtacccagtggccaggattgctgaatgaatgagtgagagcaacataaaccctttcttggccatcgtgatgaagcctcagagcctcgcctgaacttggtgactcgcctgacatctgccattttggcttggcccgcgctggctgatggaggacatgggatctgggctgggtcctgtcctcagccctgccccagtggttgtgacctgtctgatggggcggggctgagtggttgacactgcggacatcttgggggaagggcttgaccacaggctcttcctgcatatctcaaggtccaacaccaggctggacgctgaggggaacattggtggtgggttctcaggcccagggcaggtgtccaggcccgtggggggcacctgccaatgtgcacgagccacagcagagcaccctgggttcccagtccagcctcggccctggacgtgactgagagaaggggtatgaggagcacctgtggacaggcgtggggatgctcctctggggcctgggcagttttgacaggtggctggctaaggctcaggctcctgtgggggtggtgaggatgacaagaaaggaatgaaggccagagacattgtggagaaaaagtcaacaggaaagggtgactccatgtgagaggaaaggagggtcgtgtctacacaatcactgtcatagatcagcctcctccttgggcgtggccttggccagggggccgcaggatggcagccttgggtgcccaccccctggagtgtgggtcctgctctgggtggtgacgctgctgggggcctcggcaccccctgggctgccctcccagcgaggatctgtgttcccagacggcaggcatgcctcatcctgggctcccagaacaagctgccactgtgggctgtgggctggggccgctgccaggcaggcggggtggggggcaggaggggatgagagggcttttgtttccttctgtttgtgtcaagatgggaatggacttcctcccaccaggcggcctcgaggtgtaaaggaaagggcagccccagtgggcgggttttgggtcacccgtttttttgggtgcatttctctgggctcccgcctcagccccgccctctcctcccagccctcctgcctcaaagctcacccttccccaccagacctgttgtggcccagccctggttaaatatttgccaaccgagaagagttttcaaggcagccttgtgaaaaaccccagctgactcctggctctgttgggcctgacctgcctctgtgatgagacccagacggcctgtgccctcagactgagtccctgcccaccatggcctccctggtgacctgtttggcgcctgaggctgggtgacctaacacttgttcggcacttgtttatcaagcacccccctgggcctggcgggagctgggtgctggggagacagcggagagcagtctcagtccggggagcgtctcagatgaggcattaactgtggttgaggggagtgccggggagcaggccaggggctgtgggagtggaggccagggaggctgtggagacctgggaggccgggacttgtctggagggagggttccgaggaggtggcacttgagcctggggaggagaaagaggagttggccaggcacaaggggtggacgctaggagggcactgtagacgtgggaccccaaggccagaggccagatttcctccgctgaggaggaagctgaggggctgaggttgcggttcgcttgggttcgctgggtgtgaaagccccattcacctgtttctccccaagatggtctcagaggagctgggacactaacagggcaatgggaccctgggcagcttttccccatttccccagcctcagtttccccatctgtccaaaagatagtttggacttgatcttggaggtcccttcccaggtccagtggcctcttaggagtatgtggctggcccatgaatgagggaatgtgccatggcagggattctaccagcaccaaaggccaagataacagccatggccgggtgcggtggctcatgcctgtaatcctagcacttcgggaggccgaggcgggtggatcacctgaggtcaggaattcgagaccagcctgaccaacgtggtgaaaccccgtctctactaaaaatacaaaaatcagctgggtgtggtggcacatgcctgtaatcccagctgcttgggaggctgaggcaggagaattgtttgaacctgggaggcggagattgcagcgagctgagatcatgccactgcactccagcctgggcaacagagtggggactccatctcaaaaaaaaaattaattaattaattaaaaaaataaaagaaaaaaagaataacagccatgtgcccttatagggttcatgcagccctatcctggtgttagcaacaaaagccaacatctcctgagtgctccctgccctagcaaccttgtgaggtggtggtggaggactatgacattatacccattttacagataaggaaactgaggcccagagaggctgttctgagctcagggtttgcttcttgttttaagcatggctccagaaatacccgtctctgtgagaaacccaccctcctctcccaaggccagcgccatgttaggtaccagggatacggaagtgaacaagataccattccaacctgggaagctgccagtcgagcaaggaatgtcccagcagagagtcagcaaatggttctagctcttctctcttccagcacagtttgagcagcgaacagaagcaggcttgccttcacatcccagttttgctcttccctgtgtagtatcgggaaagtcacttaacttctcaggagcctcagatcccttatccataaagtgggtttggcagtacgtcccagtgagggttaaatgaaacaatgttgactataatttttagcatatatgggatctgcctctgtgcctggcacagaactaactgttacatgcattagctcatgttgcaattatgattataattttctgcaagtggggaactgaagaacagtgtgatggaggagaggatgggtgagcagggccttgaaagtctggctaagattgtgaactgtggaattgaagggaagggcggtccagccagaggacacaacatggatgaagatgtggaggtaggaaatgtgtaatggaggcgagagacgcccagggtgtggggatgggaaggagagcggggctgaggttgcggatcttggatgtgattctgtgtaacatgcttgtgggcttcagtgtgccaggcctgtggtgacaagttagtccatagtctcttggggccatcagagcccagagagatcctttacaaagtgcttcatgcaaccatcttccagatgtttccacagcccgtggagtctaggttcagccagcctgggctcacaccccagcttggattttggctccctgcttgacagccggctgacctgggacaaggccctggaccttccagcctctgtcttgatcgggggtgattcctgtaccacttcctgcagctgttgtccgggtctatgtcagatggcgtgaggtgtccccagccagcgtgacacccattagcttcggggtaggagggctccctaactgttctgtgcctttttgttcctggtgtggagacagagcctttctccctgggccattttgagagtcgagaatgatctcgcactggaagtccctagctgagggctggctcacgcagggtcacacggctgtcattgtcgggccttggcgtgctgagggatgctgtctttaagggaagaggtttttccttgttaataactggccttggggccaggcacagtggctcacgcctgtaaccccagcactttgggaggctgaggcgggtggatcacctgaggtcaggagttcgaggccagcctggccaacatggtgaaacccccatctctactaaaaatacaaaaaattagccaggtgtgatggtgggtgcctgtaatcccagctactggggaggctgaggcagaagaattgcttgaatctgggaggcagaggttgcagtgagccaagatcgtgccactgcactccagcctgggcaacagagccagactccgtctcaaaacaaaacaaaacaaaactggcctcagggaagagtgacgcagccaagggccccttcagggcacctgaggccagcagggggggaaatgtcggtggcagccaccttcccaaggaaggacagcacagtgtacatttcctcatccccaggacccagccaagggcctgctccgatgtcagcctccgtttccgtggtgaggaatctccggggtgtgtgggggcttattgctcagtggcttcgtggctctcttttgggggtgggtctggcctgagattggcacttctggcctgttgctgtgggcttcccttccttttccactgcgtgccaggccctgccccaggagcaggggtgctgcctgtgggagccacatgaggaacagacctttacccaccaggaggccagcggtgggctgcgggaataggtggagggctcccacccagcctggggctttccagttgaaagacgcatggtggtgggctgaggagtgagcttggcggaagactgtattccggacatggggagcagcctctgcgagaccccagatgacttgggcctgcgggcatggtaaggagctcagttccatcccagaggcagtaggagctgtaccactggaaggtttctgagccaggaaacgttgggcaactcccctgtggcccctgtgtgtgggaaggatcagaggcagccaggatggagtaggcaggacttcagtggctgcggcgggcacaggacgggagtggcctggctggggggcagtgactagaggcacaggctgggtggccacttgactggcccctgggtgctggggagcctgcctcaccctgttgggcttgtgctagggggcaggtagtggtggggtgggaatcccataggccctgtttctctcaggcccagaaggggggtcccaggggtctgctgttgtaccccttctgccaaggatggctcatggagggaccctgaatccgtcccttgccttctctggtatggtccctcttctggacaggaattgattgggtgggggacactcagctgtcctcctccttcctggcctgccagattctggctgctggctcaggctcttctcgtggatgggctgctggtccccctcctgctacttgatggagcctgtcattacccctcccacccccaacttcccacctgattacaggtcctgagcaggagccctgtgtctgcccttcccgtggaggccacccacaggctggtgctgcggaggccagggtgagatggttttgcccaaacgttggttccctgttcagagttcatgtcatttacaagctgtgtgtccctggagaagtcccttaacctctctgagcctcagtgttctctgggaagtgaggacagtgcgtgaaataatgagtgtgcatgtgcagtgccgtgctgggcacagaggtggtgctgacaagtggctgctgctattgtgtgtcgattgtgacagtaggtggggggcaagtagaaagtagaaaggccctgagcgaggcactggtctatgccaacccagctctgttggatgtgctgtgtggccctaggagagtgtcaccacctttctggaccccaagctctccctgctgtctcaggcacatgatggagatggtggtgcttgggacaactctgagacctgcgagaatggagtccctgccccgactctgcctctgctggtccctggactgtagggtgggtggggtcggcacccccctctttcccccacctccccatgctggacctgctccctatgccctgggaaccaggcgggcaggttctgagcctgccccaccctacagggtgctgctacctgcctggtttcagtcggcaaacctctcagccctgaaaccctgaaaccgggctgggcctcgtgggtgaggtgtgtccctggagcccactggagagaccggatgagccaggaacgggtctggcacagcgccctccactggggccaaaccagggctggcgccggcgtgcagcccccatggtggacatgagctggatgtggtcgcagctggagatgactctcttcctcttgggtcccccgtccgtgtggaacagggtttcaggcttaggcatcaggtcgggaccagggtgcagatcctacctctgcctcttctcagcagagtgatttggcagaggtacccagttctcggtcacctggtctgaaatgttctgccagtaccaataccacctggcccgaggttgagttgaagaatcgggggcacgtgtccaagcaaaatgcttagcacaggagcggcacatggtggctttggggagcgtcatgacaaggcaaagaaggaactccttagcttggcattcgaggccctccgggatacgcctttttaggtccattttctgagaacccctggactccttcctccattctcagctcagcaagcctcctctcctctctgagcctcagttcccctatctgcacagtgggcctggtaccccatcccccagctccccaagcctccaggccaccctggggcctccccagttcttgcccagcctcactatctgcacaggaagtagcgtggcccttaacgttgtcagtttggaaaatcagagattaattaacgttccggccgccttggctgctgttggagctggtcccagggtgggccaggctgcatgctcagcctctgtttcaagggcctcactgtgggttagaggaaccttgacaagaggcacttcttaggagcccccattggtgaagtgcccccttcttgccagggtaaagggcttcatgctcagtagcccgtttgtctcataacccattcaggcagatactgttgtgccattttgcagaggggaaaataaaggctcagagaggagaagtgccttagccaaggccacacagctcataggtggcagagctgggacttggacccagagcctgtgtgtccatgtagaaatggtgccctgtttgcaggtgatggggggtgcctagttctccccccgggtccttttgtctggcccgagggggctgtgatcagctgctggtcagagctgactcaccagcagctcacaggaggggctgaggccagcatcccggtcagttcctggggccagggcagcactgattagattgtcgttgagattttcggtcagctgagctgacagggacccaccctcccattttaaaggtgggaaaattagggcccagtgaggatgaagaagtaaggctccagtgggtcggatgattctccaccagctccgacccgacaggggccagtggagctggaaaccctagacctcagtcccggctctgacacctgccagctgttgcctcgggaaagtcactttgccctctgagcctcggtttcctcgtctgtaagatgaggatagtaaagccttgtgttgcctcattcttgggattgggcaagaccccagcaagagagtggaaaaccaggggtttgaaagcggcattgcgggtcctcgtgaggggtcactgggatgagaggctttgcggggtagggctctgtgcaggctttggtgggagacaaggtccaaaacccacctctttcccctccgttgtgtgtctttgagtgagtcagtgagtctctctgagcctcacttttcttcctttctttttttttgactgacccaaattagatctttattgtatttttccacatatctatcattcccaaaagatcagtcagctcgatccttaatttttcttactatgagatgtccctaatacacagtctttgtataaattatccattttaagtatatagtgaattccagatgtgatcacaactgcatttctttctttttttttttttttttgagatggagtctcactgtgtctcccaggctagagtacgatggcgcaatctcagctcactgcagcctccatctcccaggttcaagcaattatcctgcctcagtctcccaagtagctgggattacaggcgcccaccaccatgcctggctaatttttgtatttttggtagagatggggtttcaccatgttggccaggctggtctcaaactcctgacctcaagtgatctgcctgcctcggcctcccaaagtgctgggattacaggcgtgagccactgtgcccggccgcacaactgcatttctttttttttttttttttctttgagatggagtctcactgtgtctcccaggttggaatgcagtggcgcgatcttggctcacagcaacctctgcctctcagattgaagtgattctcctgcctcagcctcctgagtagctgggattgcaggcacgcatcaccatgcctggccacacaactgcgtttctaaatagccatgtgacactcactgagtgcttcctgggtggcagccgctgtgtttagcctgagtctcacttttcttatctgtcagatgggatactaatacctgttaggattaaacaggctgtggagcatgcagtaagttgtcggtggataggcacctatccctggcaaactctggggatccaggggcagagttaggaggactggcttgtgagggggtccttctcagtcaccctcaataacccgataggatgcagcccttggagacagggttccagtcatatggggagcagagcccccctgagatccacagagcacccccttattcaaccaacttgctgaaagggttggctctcagctccacaacaaacccacaagtgtgtgttgtgagttttgccctggacctgcatccccaaaagtggcctcttcagaggtggatgcagcccagtacccatagagacaccaggtggagacagaggcctgggatgggagtggcttcctgaggtccctgggcacagatcaggactcaactccactcccagaattcacacactgccctcttgggctaagaagggaaccgggaccccaacaggcaggcgccttttgtgacaacctctgtgaggggcctcggcaggttttgtggactgacagagtggcctttcctgagctgtttaattgttctgagcctcggttcatacagctgtaaagtgagggttgtatttccctctgggccatttgaagaatggtgtgtgttggggcaaagaacaggtgggccctgtgtctgatgggcgtgggcttacctcctgctggcagaaagcgaaaagggggcaaccaacggctctgggcgccagcagaggctaagggttatgccaggggatcccagccacggttaggcaggaccccccatcaaacgcagggacctgctgtcccccttggcttccccgcatctgtgatctttgtttgtggaaggcctcccatcattatcattattattttgtgattcttgtcccggttcttcagaaaacaaatctttattggattatttcaaactataaaagttatactgctaataaacatttcaaacagtctcttatgactgctgttctcagctgaggacactgatgattaacagtgacgtttatggaggcctggagctgagcacctcaaacgctatccggtcctgcagagctcagagctcgggaacagcttcggagaggcccatttacaaatgaagaatgtgagtctctgagagctaggcgcttgcagggctggcatatggcagggcggggactctggtcctgacttcaagctcctcaccaggaggctgggcacctggggccgcagggcaggctctgtgagtcctgccccactccattccctgccttctcacctagcagcacctggggcagagtcaatgcagggaggcagaatggatgagataatgtggaaagtgacgaagctggcacacaccttcacaccaccccaccccagcctctctgtagctcacagaagcgagtgatttctaccaccagctggagccccccagttcctgggcccaggacctgcgggccagccctgcctctgtagatgggggcacagccagtttcctctctgccctctaaggggaggtagggggcctgtggggccctgtagacaatggccagagctaggaccaggagggtggcatgcagccgactatggctcgaacctaattgcctccatctggctgtgtgacctcagctgagctgctcaccctctctggctcacattcccctaacagggtggtaagcctgagtgttggaggccctgtccaacatctgccccaaatccgtggcgtgtggtgtctccagaggctgcggcaggaaatggaaagagctgctgtgggcaagtatggaggaaagaggggtgcccgggctcaggacccccacagacacccaggccgggacgccatgtgggaatttgagttgtaaaatcctgaagcaacaatgccgggggagagccactgcagggagcaagaaggaaaagtggggtactgggtggggcctgcctggactgcagccccagagctcagcaggtaaggcggtggccaggctgggtcctctggctgagcccccaccagggctgcagtgctcgcctgggtcctcttccagcagggtccagccaggaaggccctgcaagccctttgtccaggctggccccctcccaatgctgctggccttttgggtccctctggcctccacacctggggtccccagcacccgagtcctcatcttctgcgtctctgggttacttcctctgtacaaagcacgtggcggttccttccatgctggctgaggacatctctcaagaatgtgctcggggctacccctgccaaggagccatccgtggccctgtttcccatggtcctccctttctagctctcccgtggtcgccacccttcttctgagcggagctggcttcccggtgctgcctgggctccgtccttaaggtccttaaccccttgctaatgctgtccccctacctgcagcatggcgctccctcagtaccccctccgatgcctgccccacggccttcccttgtttggacttagtaactatttggctgctggaccaaacccccactattcctccccttgccgacatctgcttgtgccaggcctggtgcccaggatccagtggtgagcaaaaggagaccagacccctccagcagagttcctggccctccctacctgacccatttggctcctgaattctgagagcaagcctggatagtgagcgactccagccccacctggggccaacgtgacaaacctagagggaactgcatcctggacccctggcccttgcctgggtcccctcagcccgaggccctaggcctgtgggcagcactgcgctggtccagggacctgaccttcagccttgaccttcagctcccaccctgacaggcagcggggtccctgcactcccatgtctcccttcctcagagcttcctgcagcttcctctccagtccacagcctgcccaacttgggccttaactgtccctcggtgggacatgcctgggccttctcctggctcagtcttgccctcttttgtcctccccagcccagcccaggggcctttctgaacccagctcctccctgcctggacaccatatctggactgtgctgtccgggcagttgagcacgggctgcggtcaggcagacctgtgttcgagtcctcacagcaatggcagctccctccagggcctgctccgtgagggccagggtggcagactccagccctttgggatctgtctgtgggctgggtgcactggggctggctgggggccctggagccacggccaaaggaaccctgagacctgcaggcccaagcctgcccatcctgccgaccacgttgatagaatgcctgtggggtgcgtggcttgactcctcatccctgaaataggaaaacaacagcactggcttcctggggttctcatggagattctctgggttcacatacgtaaaacctgccgtagcacgggtttaatgctctgcaagtggtggccatgacgatgacaaccatggtaccgatgttattgtcagcttccatcctcttttctctattatccccgatgtatgactctcttccatttgccccctctctgcctcatgatttttcaaaacaattcccatggtctcagagagagttctggttgtttatggtttttaaaaaataggcattcaaagcaaattcctcatttgttctccccttcctccccccaaactggaatctggacagacatgacctcactccaggaaaggggagtacagggagggacagggtctgtggagaggggttggggggcatccctccacccccatcactgaggcagggcccggggtgtgggcagacacccaggaaggtcacatgcctgggaccctggttatgagctgtgaggcatggtgtgtgacatgccctttcagccctcctcccaggccaccacctcctggtggggacccaggactgcatcccagctctaccacccactggctgtgtgaccttatgccagtgacttaacctccctgggcctcagttacctcctctgtaaagtggggataacacaggttctccctcacagaactatagagaggatggaatgaaatgtcatcctagccaggtgccctcggtacctggagactggccatgggaggggcaggttcctgccagctcctgttttgagaaaggaccaggtctttgaaacctggaatccaagactgtcagagatggcagggcctgtccgtcatcgaatgcagcctctcagtgcatgggggaaaccgaggctcagagaggggagccgcacagcgggccagcacaaatcccagttgggacgcgagctgcagcttcttaggaccaggaagcctctcccctcatgggtccgagaccctctctgggcctcctccttcatctgaacatgggggcacccaggagcacacgtgctgagcctgatgtggcctgggcctgccttcaaggccatagcactcacctctattcagaaaccgcgcagaagacagaagcaaatggccagtgaaagcagaaaggttgttcacttggtagaggcattaattttagaatgtttattttttattatgaaaggaatcatgattataaaataattcaaatgctataaaaggaaataaaccaaaaatgaagttcactctgtactccccactcccacaccagaggtcctgccttcctagcctggcatgctgccttccagacctcctccacgcacccaagcctaagtaagctatatgcacaaataggaggagttttggttttgttatgtgtgtgttgagacagggtctcgctctgtcgcccaggctggagtgcagttgcacgatcatagctcgctgcagcctcgacctccctgggcttaagtgaccctcccacctcagcctcctgaatagctgggaatacaggcacacgccaccacacctggctaatttttgttttgttttgttttgttttttgagatggagtctcgctctgtcgcccaggctggagtgcagtggcacgatctcggctcactgcaagctccgcctcccgggttcatgccattctcctgcctcagcctcccgagtagctgggactacaggcgcccgccaccatgcctggctaattttttctattttttagtagatacagggtttcaccgtgttagccagggtggtctctatctcctgaccttgtgatctgcccacctcggcctcccaaagtgctgggattacaggcctaagccaccgtgcccagccttttgttttgtttttttaagatagagtcttgctctgtcacccaggatggggtgtagtggtacgatcttggttcattgcaacctctgcctcctgggttcaagtgattctcctgtctcagcctcctgagtagccgggattacaggtacccgccaccatgcctggctaatttttctatttttagtagagatggggttttgccatgttggccaggctggtctcgaactcctgacctcaggtgatctgtctaccttgtcctcccaaagtgctgtgaaccaccgcacctggccagacttttgtatttttttgtagggatgaggtcttgctgtgttgctcaggctggtctcaaactcctgggctcaagcgatccacctgccttagtctcccaaagtgctgggattataggtgtgagccactgcacctggccagaaagcgatttttttttttttaaatgagctgatagtcaacaggtgactctgtcacttgctttctttccttaatggagcatgagccctttccgtttgttggcacctatccggataggtccctccatttttttaaatttttttattatatggagtctcgctctgtcgcccaggctggagtgcagtggtgcaatctcgactcactgaaacctccgccttccaccaaacttccaggttcaagtgattctcctgcctcagtctcctgagtagctggccttacaggcgcctgccaccatgccctgctgatttttgtatttttagtagagacaggatttcgccatgttggccacattgggcttgaactcctgacctcaggtgatccacctaccttggccttgaaaagttctgggagccaccatgcctggcccccctccatctttttactttttactgacctgggtgaatgaaccaatgtataccgatcatccctagagatcacattcagctgctccccgctatggcctcagtgcacattcgcctttgtgtcctgcgaatcgttctatgggggtagattcctagaggtgggagcatccaaggacaggacacccaccctccgaaatggctgtccccattcctggcgcccccagctctgagtgacatggcctgtttttgcatgtccccaccagtgtgacgacaggaaatggagtcttggttctgtttgcatttgtttgattctctgtctatggccattacccgctttcccatctggaggttcaccttttccaaggcagttggttttcacaggaaacgcggggctctggccagaaatgcagcgcagatgagcgcgaggagcctgtgcaaacaattccacatgcaggaatttggggctttgcagccactcctgcctaggggaaggatcgtgatgcatcagcatccctgaggacctcaagctcctgcttgtccttctcttccagaaaaaaccgggaagatcctgacggagttcctccagttctatgaagaccagtatggcgtggctctcttcaacagcatgcgccatgagattgagggcacggggctgccgcaggcccagctgctctggcgcaaggtgagaggtgctgggagggctcgggtatgttctgctacttctcgccatgtggcctcgggggagtgaccttacttttctgggcctcagtttcccattgttactgtgatggcctctaagggtctccccagcttctttttttaaaattaattatttttttcttttttgagacagagtctcgctctgtcactcaggctggagtgcagtggcacaatctcagctcactgcaacctccgcctcccaggttcaaggcactctcctgactcagcctcccgagtagctgggaccacaggcgtgcaccaccatgcccggctaagtttttgtatttttagtagagatggggttttaccatgttggccaggctggtctcaaactcctgacctcaagccatctgactgccttagcctcccaaaatgctgggattacaggcaggtgtgagccactatgtgcggcttattcaattttttttttttcagactgggtcttgctgttgcccaggctggagtgcagtggcgcaatcatgcctcactgcagcctcaaccttcctggctcaagtgatccttccacctcagtctccccagttactgggactacaggtgcacaccatcactctaggctaatttttgcattttttgtagagatggggttttgctgtgttgcccaggctggtctcaaactcctgggctcaagtgatcctccagcctcagctccccaaaagtgctgggattacaggcgtgagccaccatgcctagcctccttcccacttctgaataggtgggtaacccaggtcgtgttgttgagaccccttcagtcaccgtgggtgactcctcctagctcacctcctccaccatcagagctggggctctagagtctggatagtctccaattcaaggcaagctcctccagtaagagcctcagtttactcatctgtcaaatgggatgagaacacctccttcacagggtggttgtgcctgaagcagggaaggcactgtcactggctccatcatgatctgctatgatataaatagtaggatgctgtttgctaaggacatatttgttgagtgagagattagaagctgcctggctccagcctgagggtcagcgtgggccagagggggctggcaaagccttctgggaagaggaacctgtgattgactcggacacggggccgggggcgggactcaagagatcctcccaccttggcctcccaaagtgctgggattacaggcctcagctgccgcacctggccaaggctgagcctttaagtggctcattcaggatggcggaggctggaccagcccagggccctttctgctgtgactgcaacccgcccggtggagggaggtcaggaccgtgtgtcggagctgctcagagcatcacctttgctttttgacccagaaaaggttgcctcttccccagtgtcatggtaacctcttgaccctgtggcagcagagcgtcagaggggcctgctgtggcccggcctgggtgtctggcaggtgcgtatctgtgtggtaggaaaggaaagaaaaggaggccttggacgcagcccaggtgagcggggccagaatggctcccctgtctggaaagaaatgtcatgggcagcccaagtccctataatccaagacaagtgggcactggctgagggcgtgaagcatttcctctgcgtgaggcctcatttaagtctggggaggcaggagtgcatatttatttgtagaaaaatagcaacatgtaagcaaggagagtgaaatgagatcactcacccacagtccctgaaaagcagtatttttggtctcattttggccactcaggaaaccgatcatcacaatgcaaagttatgataacatcataatactggaaataatattaatcaccagtggtgatcaaaacaatagtggtttttattagaaacaataatagaatacaaataaaaatagtgataataatgataacgtaataatacaacagaaataagaataataaaacagcagttgtctttttgtttgtttttgctttttcagagtctcactctgttgcccaggctggagtgcagtggcacagtctcggctcactgcaacctccacctccctggttcaagcgattctcatacctcagcttccccagtagctgggatcacaggcatccaccaccacaccccgctaattttttatatttttagtagagacagggtttcaccatgttggccaggctggtctcgaactcctgaccttaggtgatccacctgcctcggcctcccaaagtgctgggattacgggcgtgagccacagcgcccggctaaaacagcagttatcttatgccggtactgtttgctcagccccgtggccccactctgagggaggggctatgatgatgcctgcatcacagatgtagacattgaggctcagagatgtggagctacttgtccaggatctggcagtcggtggtgccgacacaggagttccagttatctgaccttggggcctgtgctgtctctgaccgaggcattggagagcttcgcagagtctaaaatattttgcctgggctgtcgagttctgtttcatttcctgcaggccttccaattgaacacgactctgccatttgaaagtcttaaaaataaaacccaaacccacagccagccacccattcgagctccccaggatctgggggcggactgggtggtgggggttgttgagcctgcctgggccacaagcctgcttctgcacagcctcctgctgggctgggactggccctgtcccggagtgcccgtccttgtgtcccggggctcctgccctaagcagggatgaagatgaaaactaggggccttttgctagggtgttatgagagctctgtctgctctttctagaaaagacagggatttgagctgggtgtgggcagtttatacatagacggctgagggcagctctgtgacttgggcaaagcccactgtgtgtgggggtggtaggggaaccattttcttttcctgtaaatatttttatacccggtaggaagaagcctgcaggtcctattgtgtgagcacaatgggctctccttctccaggagtgttttgtgtttccccttgaagagcagcagggagggagctggggagagggggacatggtgaagggggtggagagacgggactgcagggatgggccagcgcagagccaggaagccaggaaggtgcaggcatgatggcaatcaccctttctccatgagtgcatctgagaaatgtttctttttgcaaaaggcaccttatttattgtagaacaaatagaatttgcagaggaacactgtactctcctgggttccctcccatccaagacgaagcctcttccactgtggtctatctccttccagaagctttctggtgcttgtctgctcaggacgccttgcacctggccatagcttcgcttgggcccccaaccctagtttaaagatctcccttctccttccccatccccagataagtcagtccctgaggattggaggtcgtcacagacgctgagtcctaccgtagtggtcatggcggtcctgtgcattatgcacctgcctgtcaggtgccaactcttactgttcccattttacagatgaggaaactgatgctcaaagtgactagacacactgtgagtcaggcagagctagggctttgtaggaaggtccgggcgtttctgcagcccatgtaggtcactagcctgccaggacgcgggtcagacatcaaacacccccagacagaggccccctccattccccctactcctttttaggaaggcgtctcatcagccatcagagctgacaggctctctggagccaccttgttcaagttatcattgccctgaggggaaacagaagcctagagctggggagaggcttgcccaggcactggggccctcgcagttctggcctgtgggtgtgtcccccgtgcccggagcgacctcggggcaccagtgctgtagctgtaggtgggtggggagcaaccatctccccagacccttccaaggtagcggtgacagcccaaggctgggatggagagggagagcctggctgtggccaggccctacatcagtgcctgtcctgggttcaagtcctggcatcaccaccctgcctggatgctgggtgagcccctccacggctccgagtctcgctcctcctctgcagaatggatgagatgcagcccggcctcagaggccttgggaggacttggggagacccaaaatggaggacatgctaggcagggggtgcgcacacaggctctgctggctgggccatcagcttcatggggagcaccacccccccagacctgggcctcactccccacccgctcctgcccacaggtgccactggacgagcgcatcgtcttctcggggaacctcttccagcaccaggaggacagcaagaagtggagaaaccgcttcagcctcgtgccccacaactacgggctggtgctctacgaaaacaaagcggtgaggcctggccccgggcgccacactgagcctccccgctttctccatgtgtgccccctcccccaactcggaaacttaggccccagacgccaccgtcacagcctgcacgcggtcaccagggccagagcaccacctcagcccctcccctcccccaaactgggctgccctgggtgccctctctggacggcagctcattcttcatctctggggaatatcgctgactccttctgtccctcataaaccaactgtcactcactcctccccatccctcctaatctctcttcagtccctccagctggctccagggcgttcctcctgccacctccttcctcactgggcttcctgcctctcctccgacccctcccaccctcgacagccacagagagctgttggaggcacaatctggccattccttgcggtggcttgcccctgccctacaggtgggtaggtgtccgagaaggacatcctatgggagcattgtgccttatcttttccctgagccctcagggaagccccacctggttgagccacagacctgatttcttcaattgctcatttctccagagcagccagaaggacaggcctgggccctgtatttcacggaagatcaatgttagagcaacataaagtcaagagcaacctcgtgccccagagtagtggttctcaactggtagcacgtccaaatcacctgaagggcttgctgaaagacacggtgctgggctttcccccagagtttgattcaggttgggagccaagatttgcatctcttttttttttctttttttttttttttttgagatgaagtctagctctgtcgccaggctggagtgcagtggcgccatctcagctcactgcaacctccacctccctggctcaagtgattctcctgcctcagcctcaggagtagctgggactacaggcgtgcaccaccattcccagctaatttttgtatttttagtagagactggttttcaccatgttggcccggatggtcttgatctcctgacctcatgatctgcccacctcggcctcccaaagtgctgcgattacaggcgtgagccactgcacccggactgtaaagatttgcatttctagtaagttctcgggtggtgttgaagatcagagaccatgttttgcaaatcagtgccctacaggttctgagctactttcaggaactgtgttgtatagtgacacctagtggcagggagtagcatggtagccctgctgtatgagctattccatcagaactgctttgccccctgctactggtgtaagtttctagacctaattctccagaggacgcttgtgtgatgctcagaacctaggaaattggtgggggcagttcagggtaatggtcaaataccccaggctctggagatagatagccctggttcatgtcctacatctgctacttcccaactgtgtgaagttgggggtgatccaccttttgaattgggaaaattctgtgaaattaagcatgcaatgcccttagcacagggcctggtatgtaagaaatgcttaactagtggagctgctgggaacagaggcaatagcagcagtagaaacagaacaacaacctcggccaagctcgctgagtccttgtggtgtgccaggcactgcagattatctcactcagtcctcacatggctctgtgaggcaggaatggttattaccctggttttgtttttattttaaaatgttttccccatcctgaatattcttgattccctggttttatagatgaagaagctgaagtttaggcatttaaggaattttatcctcagcatcacacagacactacccagtgaagccaggaattgagcccagagctggggtctaggttgctgtggatgccacactgccccaatcaccatgatagtgacattctcccctctgttcctctcttgcctcttcttcctttcccttctcctccccactttgggccacactgagtagggccttgaagccaggtgggatttgggcttggccgcaccttaaccctcagggaccctctctcttgcctccctcaggcctatgagcggcaggtcccaccacgagccgtcatcaacagtgcaggctacaaaatcctcacgtccgtggaccaatacctggagctcattggcaactccttaccaggtaaaggagcacccatcccaggccacaatgccctgcacaggcatctggagctggccaggggaggggtggccctgagcccattgctttcagccccatgtttgcggagagaccaactaggcttagagctgtggatggagacctcattgtttgcctttcgcatctccctaagtccttgagagcctcctggaagatgttcagtgaccttccctcgtaaacctgtgggtcagcactgtgttcgtcaggagttactcttcttggcatcctgcttttgcttcaccttggctgaaattccctagaagccttacgggaacaacattggcctctctgatgatccctgggaactagagggcaggggacatgcctgcctggggggcaggtcatgccccagggacttgagagtagagtcatgccttcattctgtggtgatggagggcctgggcattcctggattcgagcggcattcctggattccagcagcattcctggattccagcgtgactctggctttgtttcactgtgtctgcttgggcgagtcaccccccctcccctgaatctcagcctcttcagtgtctacaaagcacaggcactaagaggactgccctcggggtgttgtgtggaccctggaggggcacaggccaacccagagccagggcagaaagaagaactgttattgtcatatcattaacaacagtggcagggtcacagcccaggaccagttatctcgctggatcttacatatccttgagaatgaaattgaaggagggaaaaattccttttgctgtattttgtccctccccacatgcctccctccccctgtggacacttaagccacactttggcctccacagccgaaatctgaagggaaacccaagaaggtagtgcttgacccttgaacctgggggctctgaccttgtgttgtttgtgctttacagagtttaaaacctaacccaagagtggggtggatgtgacttattacccactctaagaaatgggtctgcacggatgctggactcaggttttgggctgaggagaacacagccagaaagaaggctgctcccacccccgccggcttgctggtcaccttgggacaggctggccttctctgggcctgagcctgacctcagagctgatgccaagggatcagttctctgacatcctctggtggagggcaaccacagagggcagctgctcatcaggcactgtctccacagggaccacggcaaagtcgggcagtgcccccatcctcaagtgccccacacagttcccgctcatcctctggcatccttatgcgcgtcactactacttctgcatgatgacagaagccgagcaggacaagtggcaggctgtgctgcaggactgcatccggcactgcaacaatggtgagtggcctgtgggtgcagggtcggtgggagggaggggcaggacctgggttattgctgaatggtgacacctagtggctgactatggtgtggcaaccctgctctacaggctgttctaatttcccttctggggttataagaaaccatgtaataccacccttagtcttctttcttgatgaaaacagttttgtgctgctcaggaaaaaagtaggaaattattcacagaggggtgtggttgttgagcccttggaccctgagtcacaaagtcacaatcctgattctgccattttccagctacgtgaccttagggaactgacttacctcttggaggctctgtaaagtggggataatgccttgtgtgtcttaggggggttatgaggatttagagtctacctcatgcttggtaaagattttttttttaattttatatatatatatatatatatatatatatatatatatatatatatatatatatatatatattttttttttttttttttttttttaaaaccaccaacctgcagggtgatttggaaacttcactgcctccctcagggcctcattgctctcatctgtaaacttatggggtgactcttccagctcactcatttattcaacaaacatttttagtgtctactctgaggaggcccagatttaggcactgggtgtgcaacaagggagcaagaaacattccctgccctcctacaattggcagtctggtaggggagacagatgatagacagatgaggatgccagcacgatggctcacagctgtgctgggtgctgggtggagccaacctgggagcctgagggtgtgtgtgtgttgggggaggggtcgatcagggcaggctcccttgaggaggttatggttcagcttcagcagagacctgaaggagaagtcccagacctgaaggaggagatgccagaagtcccagggcccctcatatcctgcatagaggagaggggaggagtgttccaggcagaggtaggcagtcagcatgaagggagacccacaggtggtaggggtaggcccggaggaggaactgcacgaggccctgaagcagggagggggtgacctgaaatggggctggaggggggcctctggggtcaggtctggaaaagccttgaaggcctctaaggaatttgaacagaaaggctgaggatggtcttccaaggtgagggtgggtccctgggggtctttctgcccctagggaaggaacaacccagtcctggacactgaactgcttccaggtgatctggcctgagggaagctcctgcccccgccccacccttgggcgcagtgccacatggtgcagaggtggaaggttgcaggggacggagtgggcgccaatggcctctgggctgctgccgtgggactcagctcaccccacccctcctgctcgcctctccagagccacctctgccctgtctggaatctgccaagcaggaggaaccaggtcttcaatcaggccagcccctgccacctgggcccagctgcccacaaagggcctcctgttcccaggtcccggggactgtgggctgggactgggtggaggcactcaaggctctggctgcctggcccagggccctcccgcctccccagcccctggcctggtgccatctctccaggtttccaaggctaacggctgacctggcctggcagggtgggtgacctgcgccagatagggaaggggtgggcacagaacaaggtggggaagggccacctcagtcccccatgtgtgcagtggggatgatgataaacttgagcttgagagatgattgggaagagctggtctgggtggggcacttggccgtgggcctggcacgcacagtgagcactcagtggggaggccatgggggagttcttggttctaaggtgcagtggaccagagggaggcccaggagagctgctgggccagggaatgaaggggtgtcctgtgccaggaaggtgtcctgccgggtggccccttctccccagggcgggagctgacgaggctggtttcaggccttccttccaccctgcggactgtgagaaagttctctgcttcctccgtcttggaggctgggcttggaatttgtgaagcctggaattgctcactccgggggctgccaggaagtggggggtggggggaaggaggccaactgggcggacaccagcggtcccagggaccccttcacatcctgcattcctggagcagctgggggtggcaggaggcagctggggcactggctgtgccgggtcctcagtgttggcctggggtgcagaggtcaaggcttcttcctgtctgaccgtggtccccctctgtctgctgcctgggagtgaggaatgcagtttcctttcttggaaggtctccaggtctggctagagtcagctggtcctgggttcaagccccgctctgccatccactagctgagtagcctcgagcagtaactgcctctctgagcctcagttctttccctgggaaaagtagggcacagtgagctgaggattcaacgagctgatgtgtgtgcagcctcagccagggctggggcctcagtttcccaagactgccataacaaataccacagaccgggcagctacacagcagaaatatgttctctcccagctggaggtctgagtcgagggcaaggtgtcagcagggctggtttctccgagacctctctccttggctggtggccggccgccttctccctgagtcctcacagggtcatgcctctgtgtgcctgtgttttctcttctttcaagaagaaatgtacttttctttttttctttttcttttttcttcttttttgagacagaggcttgctctgtcacccaggctggagtgcagtggcgcaatctcggctcactgcaacctccgcctcccaggttcaagtgattctcctgcctcagcctcccgagtagctgggactacaggcgtgtgccaccacacctggctaattttttgtagccagaatggtcttgatctcctgatctcgtgattctgccgcctcggcctcccaaagtgctgggattacaggcgtgagtcactgtgcccggccaaaatgtactattcttttaagggcactagttgtattggatttggtcccatcctcatcccctctgtttaacttaattctttaagactctaggaccaagggcgggtgcggtggctcaggcctgtaatcccagtgctttgggaggctgaggtgggtggatctcttgaggtcaagagtttgagaccaacctggccaacatggtgaaaacccatctctactaaaaatacaaaaattagctggacatggtggcgggtgcctatagtcccagctacttgggagctgaagcgggagaatggcttgaacctgggaggcggaggctgcagtgagccaagattgcaccactgaactccagcctgggcgacagagtaagactcttctcagaaaaaaaaaaaaaaaaaaaaaaaaaagaccctgggtccaaatataatcacgttctggggtactgggggttaggactccagcatatgaatttggggggtgtggagacacacttcagcccctaacagctaggctcacgggaagagctcaggaggggtgaccctgaaacttgtcacactcagcggctgggtgtgcagaaagagagaatcccaagggtcaaggctggctggcctccctcccgctgtcccggccctctgcctcaccttctcgccacctggaaagcaggcctgccctgcacacctgacttggtgcatgcaggatgaaaattccctctccccgtgggagtgcctgcaggtaacgcactgtccagattttccagtcaaaacttggtttctaggaaaccatgcccttctgagaggcgggtggggtggcggggggacctccttccctggcccaggtgggcagcccccacccagggctctgcatgctgctccagctggaacatccctgccctgctcctgtcactcctgcctgacttcaggtctctgaaatgcaggagtgagactcccacaggcccccgtccccatccaggcagctgcgctgtagggatgagggctgggcctccccctgctcagctccctcccggctccgacaggcagtgatttctgtggtcagctgggtgtggggagaggagggacccagagaggggctttttctctgccggtggtgactcagcccatagtcatggcagtgggagccttaggtttctgatgcacaggcttccgtttccccttcctgggctttggggatgcggtggtcagaggcacgcggccaggggagtctgcctgctgcctggctcggtggcgtttgaccaccttcttaccccaagtcagattttgtaacttcctgccaattgcctcccgggcactgaatctggaggtccacgcctcactcaggggtttaccttgctggcgtttgggccactgacagcaccaacagtgacaaaaattcagaaatggtgttcttctagctgttattaatagcaaactcttccattcttttttttttttttttttttttttttgagacagagtcttactctgttgcccaggctagagtgcagtggcgcaatctcggctcactgcaacctctgcctcctgggttcaagcgattctcctgcctcagtctccctagtagctgggattacaggtgcctgccaccatgcccagctaatttttgtatttttagtagagatggggttttgccatgttagccagactggtctcgaactcctgacctcaagtgatttcccccacctcagcctcccaaagtactgggattgcaggcatgagccaccacacccagcttcattctttaacaaagttattcaagcatctgtgccaggtactgacctggacttagcagtaacaggacagaccccgggcccagtggggcaggcagctggctcctcagttattgataaaaagtgtggcgcagagcagtgctggaccctgatctcctgtccctacactgtggcccagggagccccgcagtggacctgtgaggccattgttccattgttcagaagaggaaacaggccatttcgggttcagtgatctagaaccaggctctgaaacctatggcctatgggcccagatcagccaattgcctgtttctgtcaacaaagtttattggagcagaggcacgctcatttgtttctggatggtccgtggctgtttttgtgctgtgactgtagaggcgagcattgcgggaggggttttatggcctgccgggctgagaatatctgctgcctagcctgttccaggcaaagtttgaagggccctgatctagcagtaagggaggaactggggctcgaacaagggtctctgggtgcctctagggccattctgggtggctgcttatgggacgggagcttttagtcctggctctgccactccctgctctgtgaccctgggcccgtggcctgtcccctaacggttgtctcttcatctgtaatcatctgtaaagcaataaggtgaatgatagtgcccaggtcttggggtggttgggaggatttcaggagctaaggaggaggcaagggggctgccttgtcactgttggtggtggggtcattactgcttttgcctatcagatacaaccatgactgctctgatgacgaggaaagtgagggtcccagctgcccctcctgaggtgcatgccatgtgtgtggggggggttttggtcagttctcagttggtcttggtagaggccactgggccatctgctgacctcctctctccctccgtctcctgggcaggaatccctgaggactccaaggtagagggccctgcgttcacagatgccatccgcatgtaccgacagtccaaggagctgtacggcacctgggagatgctgtgtgggaacgaggtgcaggtgaggccagacgggctggtgaggaaacctcagaagtcacccaaggacccagcaggggagggcagggggtggggtacagagatggggctctggggcgctgccggtttggaaggagatgacatgcttagatttggacaagtgcagggccagtgcacgtggagatactcgctgtcttattcatcacttactgggcatctgagcacctaccctggacgaggcactggggtgcagctgggaatgatgtggacaaattcctggccctcagggagctctccgtatagcaggagaaacagacatttggcaaataaatgtacacttccatgtgcaggcaaagcagggagggagtatggtattctaggtagggaaggcagcctgtgcaaaggccctggggctggcccttgagtctgaggatcctacaggacacccaggcagatgagttgggacctgtgggaatggagctcaggagagagggcagcagggagggtgaagcaatgggccagtcgcggaggaggtgggggctgcagcggcctggcttgtgggaatgcagagagaaacaggccagctgagcgctctccagcccctggcctggcttgtgcctcctcaacctagatcctgagcaacctggtgatggaggagctgggccctgagctgaaggcagagctcggcccgcggctgaaggggaaaccgcaggagcggcagcggcagtggatccaggtgggtgggcctggggccctggagcggggacgggacctgcagctggtgcggtgccctcagccctggtgccaattcagctgctctgcccacagatctcggacgccgtgtaccacatggtgtacgagcaggccaaggcgcgcttcgaggaggtgctgtccaaggtgcagcaggtgcagccggccatgcaggccgtcatccgaactgacatggaccaaattatcacctccaaggagcaccttgccagcaagatccgaggtaggcagccacccccgtgctcgacgggccctccaggggccaaggtggactttctttttatttcatgattcatgtaaatttcacagcaatgacttgctcattgatcatttgtaagaattagagccaaatctgcactgtggtactccaacccctgtgagttgttttgtggctattatttctataagcccagaacttgaagagaaaaatttttgttctggaggttcaagccttcttttcatctctgactcgtcacagatttttaccatgtgtcattttaaagtacatttacgttcagcaagtatagctttcccaggtcagtttattctgtcacccaggctggaatgtagtggtgcgatctcagctcaccacaacctccgcctcccggattcaaacaattctcctgcctcagcctcctgagtagctgggactacaggcacacgcgcgccaccatgcccggctaacttttgtgtatttagtagtgatggggtttcaccatgttggccaggctgatcttgaactcctgacctcgtgatccgctcaccttggcctcccaaagtcctgggattacaggcatgagccactgtgcccagactgtacgcctttctcttcccagccagatgggatcctttcaccagcttggtccccataacacatctgcagagctcagttttagcaattgtcagttgcccatgggacgttctttttattttattttatttcattttattttatttgagacagggtttcactctgtcgcccaggctgcagtgcaatggcacgaccttggctcactgcagtctctaccatcctcccacttcaaccccccaagtagctgggactacaggcatgtgccaccacgcccagcacatttttgtattttttgtagagacagggttttgccatgttgcccaggctggtctcaaatgcctgagctcaagcaatccacccaccttggcttcccaaagtgctaggattacagatgtgagcgactgtgcccagccattattattattattattttgagatggagtcttgatctgttgcccaggctggagtgcagtggcacaatctgggctcactgcaaccttgcctctcgggttcaagcaattctcctgcctcagcccctcaagtagctgggattacaggcacctgctaccatgcccagctaatttttgtatttttagtagagacagggttttgccatgttggccaggctggtcttgaattcttaacctcaagtgatccacctgcctcggcctcccaaagtgctgggattacaggtgtgagccactgtgcctggcctgttttttttgtttgtttttttttttttttttttgagacggagtctcgctctgtcgcccaggctggagtgcagtggcgtgatctcggctcactgcaagctccacctcccgggttcacaccattctcctgcctcagcctcctgagtagctgggactacaggcgcccgccaccatgcctacctaattttttgtattttttagtacagacaaggtttcaccgtgttagccaggatggtctcgatctcctgacctcatgatccgcccacctcggcatcccaaaatgctgggattataggcgtgagccaccgcgcctggccgcccggcctgttttttaagagacagagtctcgctctgtcttccaggtagagagcagtggtacaatcatggttcactgcgtgacctcctgagctcaagtagtcctcccacctcagcctcctgcgtaactgggactacaggtgcaggccaccacgcctggctaatttttaaattgtttgtagagaaaggggtcttggctgggcaaaactctatctcttttaaaaatttttgaaagagagagagagaagggggtcttactgtgttgcccaggctggtctcgaactcctggcctcagacaatcctcctgcctcagcctcccaaagcactgggattacaggcatgagtggccgtgcctggtctcctgtaggttattctttactagccagatcctgagtattggttgacagctggataggacactgagcattgacatttcttgtgtggaacaaagaacgttagctgggctgggatgggggtggacatctaaatattcttgagtgaaaatgctttggtcagaatgttctggagatggtccccacccaaaggaagaaggcttttacataattatgcagagccagccacactattccagagaggatcagcccagtttttgtaaaaccaagaggctcattgaatctactaaggtatttttcattgctgttgttctttttgttcaaacgaagaagcaagacccatcctaaaggagtttttgtctacttctagctaagcagaacactgctgacacctctgggctggcagttttcttattttattttattttcattttcatttttaatttttgtgggtacatagtaggtgtgcatatttatggggtacatgagatgttttgatcaggcatgcaatgtgtaatagtcacatcatgggaaatggggtatctatcccctcaagcatttatcctttgtgttacaaacaatccaagtatattcttttagtttttttttttttttttggacacagagtctcactcttcttgcccaggctggagtgcagtggtgccatctcagctcaccgcaacccctgcctcccaggctcaagtgattcttctgtctcagcctcccaagtagctgggattacaggcacataccaccacgcccggctaatttttgtatttttagtagaaatgggatttcaccatgttggccaggctggtctcaaactcctgacgtcaagtgatcttcctgcctcggcctcccaaagtgctgggattacaggcctgagccactgcacctgtgcagcctcttttagttacttttaagtgtacaattaaattattattgattatagtcaccctgttgcgctatcaaatactagggcttattcattctgtaaccagaaaggggtcccgatccagaccccgagagagggttcttggatcttgggcaagaaagaattcaaggtgagtccatagagttaaagcaagtttattaagaaagcgaaggaataaaagaatggctactgcgtagacagagcacgagggctgctggttgcccatttttatggttatttctgatgacatgctaaacaaggggtggattattcatgcctccctttttagatagagcatatagggagacttcctgacgttgccatggcatctgtaacctgtcatggtgctggcgggagtgtagcagtgaggacgaccgaggtcactctcatcaccatcttggttttggtgggttttgggccaccttctttactgcaacctgttttatcagcatggtctttatgacctgtatcttgtgccgacctatctcatcccatgacttagaatgccttcaccgcctggcagtgcagcccagtaggtctcagcctcattttacccagctcctatttaagatacagttgctctgattcaaatgcctctgacatttctactttttgtgcccattaaccattcccatctccccctcgccctcgactaccctctccagcctctagtaaccatctttctactctatctccatgggctcaattgctttgttttctgcttgtttatttgtctgtttttaccttttttattgctcccacaggggaggccccctccaaaatgtcaatttgctttaatttttagatcccacaaataagtgaggacatgtgatatttgtctttctgtgcctggctgaatataatgacctccagctccaaccatgttgttgcagatgactgaaactcgttcttttttacggctgaatagtaccccatcgtgtatatgtaccgcattttctttatccattcgtctgttatggacacttaggttgcttccaaatcttggttgttgtgaacagagccgcaacaaacacgggagtgcagatatcgctgcgatgggctgatttcctttatttgggtatatacccagcagtgggattgctggattgtgtggtagctctattagttttttgaggaacctccaaactgttctccatagtggttgtactcatttacattcccactgtgaaccctgaaaatttgaggcaggtctcagttaaattagaaagttgattttgccaagttggggacacgcactcgtgacacagcctcaggaggaactgatgacatgtgcccaggtggtcagagcacagcttggttttatacattttagggaaacctgagccatcaatcaacatacgtaaaatgggccgggcacagcagctcaagctgtaatcccagcactctgggaggccgaggcgggtggatcacttgaggtcaggagttcgagaccagcctggccaacatggtgaaaccccgtctctattaaaaatacaaagcttagctggatgtggtggcgcatgcctgtagtcccagctgctctaggaggctgaggcatgagaattgcttgaacctgggaggcagaggctgcagtgagccgagatcgagccactatactccagcctggtcaacagagtgagaccctgtctcaaaaaaaaaaaaaaaatgtaaaatgaacatggttcagtccggaaaggcgggagaacttgaaggaaaagcaggacaactcaatgcaggcatgaggcttccaggtcataggaagaaaagagacaaatagttgcattcttttgagttgatgattagcctctccaaaggagggaagcagatatgcattaatctcagtgagcggaggggtgactttgaatagaacgggaggtgggtttgctttaagcaattcccagcttgacttttccctttagcttcgtaattctgggggcctaagatattttcctttcacaccaccagcagtgtacggaggttcccttttctccacatcctcgctagcatttgttattttcttttttttggataaagccattttaactggggtgacgtggcatctcattgtagttttgatttgcagttctctgatcagtgatgtcaagtaccttttcatatgcctgttttgggttgagtacctttcatatgcctgtttgccatttatatgtcttctttggggaaatatgtattcaaatcttttgcccatttttaattggattactaggatttttttcctatagacttgtttgagatccttatattttctgattattaatctcttgtcagatggcagttttcttagttttttgccatcatggtttcagaaagatcagagtccaatctcagaacaccttgtcatttttcctgcatggatttctcatctttatccactatttctctgaaatcattcagcttgctaatgttgcccccagtggtttttttttttaaataatattggccaggtacggtggctcatgcctgtaatcccagcacttgggaggccaaggcaggaggatcacttgagcccagggagtttgagaccagcctggataacacagtgagactctgcctcttaaaataataataataataaaagtattgatgggggctgagcgcggtggctcacgcctataatcccagcactttgggaggccgaggtgggcgggtcacctgagatcaggagtttgagaccagcctggccaatatggtgaaaccctgtctctactaaaaatacaaaaaaaaatcaccgggcatggtggtgcacacctgtaatcccagctacttgggaggctgaggcatgagaatcacttgaacctgggaggcagtggttgcagtgagctgagatcgtgccattacattccagactgggcgacagcacgagactctgtctcaaaaattaataacaataataatatgatgggaagagagagttgggagagggctgaaaaattactttttgggcactgtgctcattacttgggtgatgagatcaatcctacccaaaacctcagggtcacacaatgtacccatggaacaagcctgcagtgtaccccctgcatctaaaataaaagttgaaataaaaatgataataatattaggaggctgaagtgggaggattgcttgagcccaggagtttgaggctacagtgagctttgattattccactgcactccggcctggacaacagagtaagaccctgtctcaaataaaataataataggccgggcatggtggctcatgcctgtaatcccagcactttgggaggccgaggcgggtggatcacgaggtgaggagtttgagaccagcctgaccaacatggtgaaaccccgtctctactaaaaatataaaaattagctgggcacagtggcacgcgcctgtagtcccagctactcaggaggctgaggcaggagaattgcttgaacctgggaggtggaggttgcagtgagctgagatcgcgccactgcactccagcctgggcgacagagcgagactccgtctcaaaaaaaatataataataatgataataatagtaatacagtagcctccagcacctgggctctgggatggctgggaggtgctccttggggagcccctgctgacccggctccctcggggcacagccttcatcctccccaaggcagaggtgtgcgtgcggaaccatgtccagccctacatcccatccatcctggaggccctgatggtccccaccagccagggcttcactgaggtgcgagatgtcttcttcaaggaggtcacggacatgaacctgaacgtcatcaacgagggcggcattgacaagctgggcgaggtgaggccggcaccgcccctaggagggggtctcctgagagtaggtctggtctgtcccagagggccccggctgcgtgactccgggcagccgttcccctccaaggccgtccctgtagacggggaggggctgctggggactaggggcagaggctgtgaggccagggctgttggagtcctcgtggggcctgcagtttgaggaaagagggaacattagctcccggccaccagcctttagaaaccaagagtggtgctaaaatagaaaagaatttaacagaagagagggaaggagggaaggagaggaggggagagggaaggagggaaggagaggagggaaggagggaaggagaggagggaaggagggaaggagaggaggggagagggaagggcgggcttcaggtggagtaatgagattgataaggaagaattcacaagtcacgcgccctccaaatggagacagccgttgcccttacttgacctcagttatctggctctcggggtgaacgtccttccacagtctccatcttgggctggctgcccggagcccgcatagttgtcagattgaatttatcctgtatcttagtttcctcctttatactctgaaatggggagtccacagaccataataatcccagaatctgagacctggagaggaccttggagagcaggaaagctctctcccaattttgaagctgaggaaactgaggctcagagagggtgaatgacttgcccaaggtcacccagcacctcagaagggatgagtgccttctgccggcaccgaggctgcctctccacagcgctgtgccactggactgcgccctccatgccttcagagcctcatgcttctgtcctgggccctcctgggtttacctttgtggccatgagcaccaggtggccatccctggtagcaggcgccagccccagggcctggacttcgaggacccaggcaaagtgtgtggggggtgctgcctggccacagggcggccctgctcagcccccgcggccccggcccctgcagtacatggagaagctgtcccggctggcgtaccaccccctgaagatgcagagctgctatgagaagatggagtcgctgcgactggacgggctgcagcagcgatttgatgtgtccagcacgtccgtgttcaagcagcgagcccagatccacatgcgggaggtagacccgaggctacgacccccaccccacaccctgtccactgccttccacaggccccctcgcccagggggtcccttctgctccgtcccgtcatgccatagccacgcttgcctggcacgctctctcctcctctgcttggaacatctgtgcctctgcccacctggctaattctgactcacttcccaggtctcagcttagagaccccttcctccaggaagctctccttgcgcccccaggccccttcccatatttcctgttgccttgaggcagggacttgctccagcgtgcagagctgtgagtgggcatagaccgcttgccattcctccctggcaggcctcggggtggggggctggttgaggatgaggacccctcagcggcacccaggaaggggctgtggtcaccctgggggcttcacatgtccgcggtatgccctgcagcaaatggacaatgccgtgtatacgttcgagaccctcctgcaccaggagctggggaaggggcccaccaaggaggagctgtgcaagtccatccagcgggtcctggagcgggtgctgaaggtgagcggccccacgccctgccccggaccgtcctaggcgaggccgagccccgagcctcatccccggccaccaccaggattgctgtccctgcaaggaggcgccatggtcctcttgtgcggatgaggactcggaggcttgggtcagaccactggcctcgtcctaccctcagggccaatggagcccactgacctgcagacccccgacccccttgttccctgcagaaatacgactacgacagcagctctgtgcggaagaggttcttccgggaggcgctgctgcagatcagcatcccgttcctgctcaagaagctggcccctacctgcaagtcggtgagcagcccccacctgctccagccgtttgggccctaagttgggggatggagcccacaggcctccctctacccttggccctgacctctcatctctgccgccccacccgggcaggagctgccccggttccaggagctgatcttcgaggactttgccaggttcatcctggtggaaaacacgtacgaggaggtggtgctgcagaccgtcatgaaggacatcctgcagggtgggtgccgtcccggggtggggactgttgccaggaggatgctgggggcgcagctgagaagtggtggcagctgagggggtcagctaaggctcaaagaaaagcccagacttgcacctggggtctgggtgaagcccactcttcgctgtgtggcctccggagcagccttagccttgcgtctctgtgctttagtttcttctcgcgtccttggctttgctgggagggtcagaggagtgattagatgacatgtggtcagcagcctgggcctggagatagcatcacggccttgctgctttcagcaacgaggcctggaatgagtcacatcccaaccacagacccccaaggcgggatgagacgggtcttctttgagcagagtccagcacaggggcggctgtgggatcagtgctgtgtcctgacccttcccctgtggccctgtagctgtgaaggaggccgcggtgcagaggaagcacaacctctaccgggacagcatggtcatgcacaacagcgaccccaacctgcacctgctggccgagggcgcccccatcgactggggcgaggagtacagcaacagcggcgggggcggcagccccagccccagcaccccggagtcagccaccctctcggaaaagcgacggcgcgccaagcaggtggtctctgtggtccaggatgaggaggtggggctgccctttgaggctagccctgagtcaccaccacctgcgtccccggacggtgtcactgagatccgaggcctgctggcccaaggtctgcggcctgagagccccccaccagccggccccctgctcaacggggcccccgctggggagagtccccagcctaaggccgcccccgaggcctcctcgccgcctgcctcacccctccagcatctcctgcctggaaaggctgtggaccttgggccccccaagcccagcgaccaggagactggagagcaggtgtccagccccagcagccaccccgccctccacaccaccaccgaggacagtgcaggggtgcagactgagttctaggccagtgggtccctgactgctgcacatggcacaggccgttcccttccggacccaggcaggctcagctctggggagggcaccctggtctgtgccttgtgggtggaggcggggcagggctgtgtggcaccgccagggagcgggcccacctgagtcactttattgggttcagtcaacactttcttgctccctgttttctcttctgtgggatgatctcagatgcaggggctggttttggggttttcctgcttgtgccaagggctggacactgctggggggctggaaagcccctcccttcctgtccttctgtggcctccatcccctcatgggtgctgccatccttcctggagagagggaggtgaaagctggtgtgagcccagtgggttcccgcccactcacccaggagctggctgggccaggaccgggagagggagcactgctgccctcctggccctgctccttccgcagttaggggtggaccgagcctcgctttccccactgttctggagggaaggggaaggagggggtcttcaggctggagccaggctgggggtgctgggtggagagatgagatttagggggtgcctcatggggtgggcaggcctggggtgaaatgagaaaggcccagaacgtgcaggtctgcggaggggaagtgtcctgagtgaaggaggggacccccatcctgggggatgctgggagtgagtgagtgagatggctgagtgagggttatggggagcctgaggttttatgggcctgtgtatccccttctcccggccccagcctgcctccctcctgcccgcctggcccacaggtctccctctggtccctgtccctctggtggttggggatggagcggcagcaaggggtgtaatggggctgggttctgtcttctacaggccaccccgaggtcctcagtggttgcctggggagccggacggggctcctgaggggtacaggttgggtgggccctccctgagggtctggggtcaggctttggcctctgctgcctctcagtcaccaagtcacctccctctgaaaatccagtcccttctttggatgtccttgtgagtcactctgggcctggctgtcgtccctcctcagcttcttgttcctgggacaagggtcaagccaggatgggcccaggcctgggatcccccaccccaggacccccaggccccctcccctgctgctttgcggggggcagggcagaaatggactccttttgggtccccgaggtggggtcccctcccagccctgcatcctccgtgccctagacctgctccccagaggaggggccttgacccacaggacgtgtggtggcgcctggcactcagggacccccagctgccgcagccctggtctctggcgcatctcttccctcttgtcccgaagatctgcgcctctagtgccttttgaggggttcccatcatccctccctgatattgtattgaaaatattatgcacactgttcatgcttctactaatcaataaacgctttatttaaagcca

SEQ ID NO: 3 - DNA, 33 bp, Homo sapiens
gggggcaagttagtcaacctgtctgagtcttag

SEQ ID NO: 4 - DNA, 33 bp, Homo sapiens
gggggcaagttagtcaccctgtctgagtcttag

SEQ ID NO: 5 - DNA, 137212 bp, Homo sapiens
  misc_feature (26162)..(26162): n is c or g
gggagtaagagtctgcgggaccggcagctgtacttcatctcccagcgggccgagcgctgaaggcagcggcgcggcgcctttgtggtagcagtggccccgcgcggaggaagttccggtgtccgcggcgctgggtcggtggcggaggctgaggagaaggaggagcgggccgtggaggcttcgccgcctaggtaagggcccgggactggaggggaggcgtgccagagcctgccagggaatagccagcagacaggcccgctctagacatcgcaggcccgcgcagcctgaaagctgtggcttcagtgtcgcggggcggctgcggcctcgctcgggaagaagaccaagcaacggtgagatgagggaggcgccgcccgtggcaggaacgccccggaaccgtcgcgggcctggggcggggcccggcgcggcagtagattaccggtcccgccgcggagcggccagctgtgaggctggggccggcgcgtggttgcggctctgtgctcctactcttcggagctgtaagcgggctgttcttgcggttttcctgtttcagatccaattctgtggcatcactaggaagggagctcttgtgcttagcacgtagcctcgtcctcagacttggacagacacaagggaggctccgctggaccggagggcacaagagctccgagcccggtcgtcggggcggtagaacctggaagcgggagagtggtctggtgggttctgcgcccgttaggcaatgaaggagaaggatgttttatcgtattcacgctttagattccattagcggtgtaaatagatgtttttctctttattttagaattgacgttaggcgaatgggttcaactttgggaatgccttttttttttttttttttttgaaggaagggccctgtttcgtagggtacataaaccgtgagcgtaattgtattttttgcatattccaggtttgcttgtgaaggtcagagtagccggatttaagtgaaggagttcagtagacatgcagacatggtcacctggttcattttctgaaccctggattgtgccctcggcttgctagtttccaccttcctattgagaaatgccaccagcgtgaatgatttaaatatgtcaccattactgaatttgtgaggtctctaacgagaggtgtcaagagctggtgcgtgatggtaggactggcagtgaagaaagtaactaaataatatgttaccattttggtgaaacacaaaagttgaatttgaaccttgtctcagaaactagcatctaactagatacctaacctgcaggacaggtcccaggtctctctggatagttgtagcacctttccttatagaattctattaccaggccgagcctggtggctcacacctgtaatcccagcactttgggaggctgaggtggggagttcgagaccagcctgactaacatggagaaaccgcgtctctactaaaagtacaaaattagccgggcatggtggcacatgcctgtaatcccagctacttgggaggctgaggcaggagaatcgcttgaacctgggaggcggaggttgcggtgagctgagattgctccattgcactccagcctgggccacaagagtgaaactctgtctcaaaaaaaaaaaaaaaaaaaaaaaaaaaaaacccgcaaaactcaacaaaaaccaacatagtagaggcagcgtttcgccttatgcccagctaattttttgtatttttttagtagaggcggagtttcgctatgttggccaggctggtcttgaactactgacctcaggtgatccacctgccttggcctcccaaagtgctgggattacaggcgtgagccaccgtgcccggccctgttatagtatttctaaaacaaattgtgagcctgggcaacatcgcaaaaccctgtctctacaaaaaatacaaaaaaaaaaaattagccaggcgtggtggcatgctcctgttagccctaactactcaggaggctgagatggaaaaatcgcttgagccggggaggtagaggttgtagtaaggggagatagtgccactgcactccaacctgggccacagaacaagactgtctcaaaaaaaaaaaaatcaattaaataaattgtggtaaatatatatttttatgtatgtttatgtatattttaacaaaatttgctctttaaaccattgttaagtatacaattcagccaggcacggtggctcacgcctgtaatcccagcactttgggacgccgaggtgggcggatcacgaggtcaggagatcgagaccatcctggctaacacggtgaaaccccatctctactaaaaatacaaaaaatgagccgtgcgtggtggtgggcgcctgtagtcccaggtactcaggaggctgaggcaggagaatggtgtgaacccgagaggcggagcttgcagtgagccgagattgcgccactgcactccagcctgggcaacagagcgagactccgagactccatctcaaaaaaaaaaaaaaaaagtatacaattcaatggtattaattacattcacaatgtagtacaagcaataccactatttctgaaactttagtatctcaaacagaaactctgtaaccagggagggcatggtggctcacgcctgtaatcccagcactttgggaggtcaacgtgggcagatcacttgagttcaggagttcaagaacagcctggccaacatggtgaaaccccgtatctactaaaaatacaaaaattagccatgcatggtggcatgcatctgtaacaccagctactaaggaggcagaggttgcagtgagctgaggtcatgccattgcacttcagcctgggctgcacagccagactccatctcaaaaaaaaagaaaaaaagaaactgtaaccattaaacaagttaacttcccatttcctcctcttaatctctaatctactttgtgtctgtctgtgagtgtgcttgttctaggtactgcaaatactaaatggaatcatacagtattgtccttttttgtgtctggtttatttcacttagtgtaatggtttcaaggttgatccatgttgtactgtgtatcagaatttcattcctttttaaggcttaatccgttgtgtgtgtacactacattttgtttattaattcatttgtagcagacacttgggttgcttctgccttttgactattgtaaataatgatgctgtgatcattggtgtacaaatatctctttgagtccctgctttgaattcttttgggtatatacccagaagggaaattgctatatggtaattattattattattaattattttatttatttttttttgagacagggtcttgctctgttgcccaggctggagttcagtggcacagtcatggctcactgcagcctcgaactcgagctcaagcagtcatcccgcctcagcttcctgagtagctgggactacaggcatgggctgccacaaccagctaatttttttgtttaatttttattttttgtgatgaagtcttgccttgttgtctagggtggtctcgaactcctgagttcaagtgatcctcctgtcttggcctcccgaagtgctggcattacaggcatgagccaccacatctggcccataatttttttattttaatttttttgtggagacagggtctccctatgttgcctatgctggtctcaaactcctggcctcaagccattttccctccttggcctctcaaggtactggtattacaggcatgagccactgcacccagttgatacttggttattatatgtttagctttttgaggacccaccatactgttttcctcaatggctgcatcgttttacattcccaccagtaatacacaagggttccaattttcccacatcctccccaacacttattttctgtttttccttttttgataaatttgtgtgtgtatatgtggttttttatttgtgtgttttgatgatagccaccctaatgggtgtgaagtggtatctcgttgtgttttcttggtttttgcttgtttgtacctttttacccatttttaagtgtgctacttagtagtagtaagtacattcttctttttgtgcaaccataataaaaatccagcttcagaacttttttcatcttcccaaactgagtttctgtacccattgaatagtaactccctattctctcctcccctgacaatcaccattctgctttctgtctctatgaatttgactactctaggtatctcatgtaagtggaatcatataatatttgatcttttgtgtatggcttattttacttagcataatatcttcaggattcatccatcttgtagtatgtatcagaattttattcctttttaaggctgagtaatattccattatacatatataccacattttgtttatccatttatctattgatggacatttgggttgtttccacctttttgctcttgtgaatataatggtgctatgaatatcagtgtacaaatatcttttttttttttttttttgtgagacagtatcgctcttgtcacccaggctggagtgcagtggcgcgaccttggctcactgcaacctctgcctcctgggttcaaggcattctcctgcctcagcctcccgagtagctgggattacagatgtgcgccaccatgcctagctaatttttttatttttagtagagaaggagtttcgccatgttgggcaggctggtcttgaacttctgacctcaggtgatcaacctgcctcggcctcccaaagtggtggaattacaggtgtcagccaccgcgcccagccacaaatatcaagtctttactttcatttcttttgggaatatatatactcagaaatggaatcgacaattgacagagcaaatggtaattctatgtgtaatttttttttaaatttttttttttgagacggattcttgctctgtcgcccaggctggagtgcagtggcgtgatctcggctcactccaagctccgcctcctgggttcttgccattctcctgcctcagcctcccgagtagctgggactacagcatccgccaccacgcccggctaattttttgtatttttagtagagacggggtttcaccgtgttagccaggatagtctccatctcctgacctcatgatctgcccgccttggcctcccaaagtgctgggattacaggcgtgagccaccgcgcccggccaattttttttttttttttttttagacagggtcttgctctgttgtccaggctggagtgcagtggtgcagtcacagttctctgcagccctgaccttctcagttcaagctatcctctcacctcaccctcttaagtagctgagactacaggtgcatgccaccatgcctaactaatttttttatttttttgtagctgtgggatttcgctaggttgcccaggctttatgtatcattttttgaggaactgccttactgttttccacactggttgcaccattttacattctgttagcagtgtacaaaggttttgttatagactgaattgtgtccccctgaaaattcacgtgttgaagccctaagccccagtgtgactgtatttggaaataggacctttacagagaaattaaaaagttagaagatatcataaggggctgggcgcgggtggctcatgcctgtaatcccagcactttgggaggctgaggcaggcggatcacaaggtcaggagatcgagaccatcctggccaacacggtgaaaccccgtctctactaaaaatacaaaacattaaccgggcgtggcggcatgcacctgtagtcccagctgctggggaggctggggcaggagaatggcgtgaacccgggaggcacagcttgcagtgagccaaaatcgcgccactgcactccagcctgggcgacagagcgagactccatctcaaaaaaaaaaaaaaaaaaaaaaaaagaagatataaggatgagaccttaatccagcaggactgctgtcttcgtaagaaaaggactggataccaggagtgcgtgtacagagagaaaaagctgcatgaggacagaggtagaagggggctgcctgcaagccaaggagagagacctcacctaaaacaaaccttgctgacaccttgatcttggactcccagcctccagagctgtgagaataatttctgtggcttaagccttccactccatggtattttgttatggcagtcctagcatactgtgtaatataggtttcaattcagtttctctgcatcctccacatcctggccaacacttgttattttctttcttttttttttttggagacagattctcgctctgtcacgcaggctggagtgcagtggcacaatcttggctcactgcaacctccacctcccgggttcaagcgattctcctgcctcagcctcccgagtaactgggattacaggcagccgccaccgtgcccagctaatttttgcattttagttgagatggtgtttctccatgttggccaggctggtcttgaactcctgacgtcaggtgacccgccagccttggcctcccaaagtgttgggattataagcatgagccaccgcgcctggcattttctttttttttgagacagagtctcactctgttgcccaggccggagtgaagtggcatgatctcggctcactgcaacctctgcctcccagattgaagcaattcttgtgcctcagcctcccgggtagctgggattacaggcgtgtgccaccacgcctggctaatttttgtattttagtagagacagggtttcaccatattagccaggctggtcttgaactcctgacctcaagtgatctgtccaccttggcctcccaaggtgctgggattacaggtgtgagccatctcacccggcctattttctgtttcgtttttttttttttcattagtagctatcctagtggatgtgaagtggtatcttattgtggtttctgatttgcatttccctgatgataagtgatgttgagcgtctgttcatgttcttattggctatttgcatattctcttttggagaagtatctattcatgtcttttgttgaccattttaaaatggggtttttcatcctggctaacacggtgaaaccctgtctctactaaaaatacaaaaaaaaaaaaaaaaaaaaattagccgggcgcagtggcaggcgcctgtagtcccagctactcgggaggctgaggcagaaggatggtgtgaacctgggaggcagagctcgcagtgagcagagattgagccactgcactccagcctgggcgacagagcgagactccgtctcaaaaaaaaaaagggggggggggggggttttgagctgggtgtgcaggtgcacacctgtattcccagctgctcaggaggctgaggtaggtggatctcttgagcccaggtgtttgagggtgcagtgagctgtgattgcaccactggactctaccctgggtgacagagtggcccagtctctaaaaataaaataaaattaggtttttgtctgtgttgttgagttttaggagtcctttatacactctagatattaattccttgtcagatatttgacttacaaatattttctctctgtggttgtctttatactctgttgatagtgtcttttgatgcacagaggttttcattttgatgaagtccaatttatcttctttttttaaaatctgtgcctcatctgcaaatattaccaatcgaaagtcatgaaatttttcccctaagattttatagttttagcgcttacgtttgggtctttgatccaatttgagttaattttttatatatttttgttgtgtaagagtcccactttattgttatgcatgtggatattcagttttcggagtaccattttccatttgggaaaaagattgtactttccccattggatggtcttgacacctttgttgaaaatcagttgactaaagttcaagactagccttgccaacatggcaatatcccgtctgtactaaaaataccacaattagctgggcatggtggtgcctggctgtaatcccagctactcgggaggctgaggcaggagaatcgcttgaactgggaggtggaggctgcagtgagctgagattgcgccactgccctccagcctgggcgacagagcgagacatgagaatctgtcttaaaaaaaaaagaaaattgaccatatatgtgaggatttatttctggtctctccattcagttgattggtctttatgtctatctttatgtccttactgcactgttgtgatggctgtagctaaatggtacacttaaaaatggttaaaataggccaggcacggtggctcacgcctataatcttagcactttaggaggctgaggtgggcagattgcctgtgctcaggggttcgagaccagcctaggcaacatagtgaaaccccgattttactaaaatacaaaaattagctgggtgtggtgtgtgcctgtaattccagctactcaggaggctaaggcacaagaattgcttgaggcctggtgctgtggctcacgcctgtaatcccagcactttgggaggccgaggcaggtcaagagatcgagaccatcctggccaatgtcatgaaacctagtctctactaaaaatacaaaaaattagctgggtgtggtggcgcgcacctagtcccagctacttgggaggctgaggcaggaggatcacttgaacccaggaggtggaggttgcagtgagccaagattgcgccactgcactctagattggcagcagagtgagactctgtctcaaaaaagaaaaaaaaaaaaaagaattgcttgaacccaggaggtagaggttgcagtgagctgagattgcaccctgcactccagcctgggcaacagagtgagactatttacatacccaatttttttttttttttttttttgggatggtgtcttgcactgtcgcccaggctggagtgctgtggcgtgatcttggctcactgcaacctctgcctcctgggttcaagcaattctcctgcctcaggctctcaagtagctgggttacaggtacctgccaccacgcctggctaatttcttgtatttttagtagagatggagtttcactatattggccaggctggtctcaaatttctgaccttgtgatccgctggcctcagcctcccaaagtgctgggactacaggtgtgagccaccacgcctggtcatacccaaatattttaccataattatacaagaatttattatttttatttttttctttttaaattctttaatcttcttcatttgttaatgctttgctgaatcataaaaaattatgaaataaaaagaataggtcttgttgattcttctttttacttacctccccctacttaccccctcttactttatcaaagaaaacacttcatttgaaacttaacggaagtacattctcccagagaggaaaatccttcaggacaacatttttttttgtttgcttgttttttttgagacggagtctcactctgtccccgaggctggagtgcagtggtgtgatcgcagctcattgcaacctctgcctcccgggttcaagcgattctcctgcctcagcctcccgagtagctgggactacaggcgcctgtcaccatgccctgctaatttctgtatttttagtagaaacagttggccaggatggtttcaatcttatgactttgtgatctgaccactttggcctcccaaagtgctgggaatacaggcgtgagccacagtgctcagccaattttttgtatttttagtggagaaaaggtttcaccgtctttgccaggatggtcttgatctcctgacctcgtgatccgcccgcctcccaaagtgctgggattacaggcctgagctaccacgcccagcctttttatttttttattttatttattttattctcagccttctgggtaactgggactacaggtgtataccaccacgctcagctaatttatgtatttttagtagaaatggggtttcgccatattggccaggctggttttgaattcctggtctcaagtgatctgcctgcctccgcctcctaaagtgctgagattacaggcatgagccactggcccagactacacttaaaattttcaaatcgagatattttggggggcaagggtgcttctagcagccactaattccagttcttgagtgcatattaaagttgctactgtttaaaagcttgtagttggatccagggagtgggtaggcggtcagagtaacccttgcttcttggtgtctccttgatgctcttagctgaatgtcctgtgtagcccacaacatttactttgggaaaaaattaagagtgtttaaagcaggatcaagctgctgcataccacagctaaaactactagaataagacccctggttctgtttcattgttttttggagctaaagtcatgattaagaaggatggcctgggatattggtactgtgctgctagaggtgcaattcctggttctttgcaagatagaccagagtgaaagcatttgttaggaatgtttttattaatcaagagtgaaaggcaaggccaggcgtggtgactcaggcttgtaatcccagcactttgggaggccaaggtgtgggatcatttgaggtcaggagttcaagaccagcctggccaacatggtgaaaccccgtctctactaaaaatacaaaaattggctgggtgtggtggtgcatgcctgtaatcccagctactcgggagactgaggcaggagaatcgcttgaatccgggagacggaggttgcagtaagctgagatcatgtcactgtggtacagtctgggtgacagagggagactgtttcaaaaaaaaaaaacagaaagaatgaaaggcaaaacattaaaaatagaattaccatgtgatctaacaattttacttctggatatatatccaaaataattgaaaacaaagaaaaagaaaaacagagtctcgatgagatatttgtacccatgttcataacagcgttattcacattagctaaaatgtggaagcaacccaactattcattgatggatgaatagataaggaaaatgtggtatgtacatataactgaaaaattattcagtgttaggaaggaaggtaattctgacatatgctacaacatggatgaaccttgaggatattatgctaagtgaaataagccagtcatgtaaaagacaaataccatataatttcacttagacactttgagtagtgaaaatcatagaaacagaaaatagttgtcagggatggtgtgagggatgaatcagcagttactatttctttttgtttgtttgttttttgagatggggtcttgctctgttgcccaggctggagtacagtggtgtgatcttggctcactgcaacctctgcctcccaggcacaagccatcttcccacctcagcgtcctcagtagctgggactacagatgtgttccaccttgtccggctgatttgtgtgtgtgtatatgtgtgtgtgtgtgtggagacaaggttttgccatgttgcccaggctggtctcgaactcctgagctcaagcatcaagcaatctacctttttcagctttccaaagtgctggcattacagacaagggccactgtgcctggcctttactatattttattttatttattatttatttatttatttatttatgtattttgagatgaagtctcactctgttgcccaggctggagtgcagtggcacgatcttggctcactgcatcctctgcctcccaagttcaagtgattctcctgcctcagcctccagttattattattattattattatttttttgttgttctgtttttttgaggtggagtctcgccctgtcgcccaggctggagtgcagtggcacaaactcggctcactgcaacctccatctcccaggttcaagtgattcttctgcctcaacctcccaagtagctgggaatacaggtgcccgccaccacgcctggctaatttttgtatttttagtagagacggggtttcaccacattggtcaggctggtcttgatctcctgatcttgtggtccacctgcctcggcctcccaaagtgctgggattataggtgtgagcccccatgccctgccttgttattattattatttttatttttttgtctgagacggagtcttgctctgtcacccaggctagaatgcagtggcacgatcttggcttagtacaacctctgcctcccgagttcaagtgattctcctgcctcagcctcccgagtatataggactacaggtgtgtgccaccatggctaatttttgtatttttagtagagatggggtttcaccatgttggtcaggatggtctagatctcttgacctcgtgatctacccgccttggcctcccaaagtgctgggattacaggcatgagccactgcgcctggccccagtttttgtatttttaatagagacagggttttggcatgttggccaggctggtctcagactcctgacctcaagtgatctgcccacttcagccttctgaagtgctgggattaaagacatgagcactgtgcccagccacttttactatattttaaattaggttacttatcctttgtttttttttttttttgagacgaagttttgctcttgttgcccaggctggtgtgcaatggtgcatctcgactcaacgcaacctctgtctcccgggttcaagtgattctcctgcctcagcctcccgagtagctgggattacaggcatgcatcaccacgccagctaattttgtatttttagtagagacagggtttctccatgttggtcaggctggtctcaaactcccgacctcaggtgatccacctgccttggcctcccaaagtgttgggattacaggcgtgtgccactgctcctggcttatttttctttttgttactgagttgaaatcattttttatatattttagatacaagtcacttaccaaatatgtaatttgcacaaattttctcccattctgtgggatgtcttttcatttaaaccaaaaaattgtagagatgggggttttgctgtgttgcccaggttggtcttgaactcctggtcttaagtgatcctctgaccttggcctcaaaaagtgctgcgattataggcatgagccaatgtgcgcagcttaccttttcttcttttctttttttttgaggcagggtcttgctctgttgcccaggctggagtgcagtggtgcaatcatggcttactgcaggctgaaactcccatgctcaagtgatcctcccactttagcctcctaggtaactgggaccttaggggcgtgccatcacaccttgctaatttttttttttttttgagatggagtcttgccctgtcgcccaggttggagtgcagtggagcgatcttggctcactgcaaattccacctcccggattcaagtgattctcctccctcagcctcctgagtagctgggactacaggcgtgtgccaccacgcccagctaatttttgtattctgagtagagacgggatttcaccacattggccaggctggtctcgatctcttgacctcgtgatctgcccgccttggcctcccaaagtgctgggattacaggtgtgagtgtgagccaccgaacctggcctttttttttttttttgagaccgtctctgtcacccaggctggagtgcagtaacatgacacaatctccgctcactgcaacctctgccttctgggttcaagtgatccttctgccacagcctcctgagtagctgggattgcaggcatgtgctaccacgcctggctaatttttgtatttttagtagagacggggtttcaccatgttggcctacctggtcttgaattcctgacctcagatgatctgcccgcatcagcctcccaaagtgctggggttacaagcgtgagccaccacgcctagctggacctgactaattaaaaaaaaaattttgtaggctgggcagggtggctcacacctgtaatcccagtactttgagaggtggaggcggggtaatcgcctgaatcaggagtttgagaccagcccgggcaacataacgaaaccctaggtctaccagaaatacacaaaaaaattagccgagcatggtagtgcacatttgtagtcccagctactcaggaggctgaggtgggaggatggctggagccagggaagcagtggttacagtgagccgagaatgtgccactgcactcccgcttgggtgacagagtgagataaggtctcagaaaaaaaaaaaaaatttataggccgggcgcaatggctcacgcctgtaatcccagcactttgggaggaccaggcgggcggatcacaaggtcaggagatcgagaccaccctggccaacatggtgaaaccccgtctccactaaaaaaatacaaaaattagctgggcgtggtggcacgtgcctgtagtcccagctacttggcaggctgaggcagaagaattgcttgaaccctggaggcggaggttgcagtgagccgagattgcaccattgcactccagcctgggcgacagagcgagactccatctcaaaaaaaaaaaaaaaaaaaatttgtgaagacaaggtctcaatatttgcccaggatggtctgaaacttctgggctcaagccatccttctgcctcagcctcccaaagtattggaattacaggtgtgagccactgtgtctggcctatttatagactcttaattctgtttccttggtctgtatgtctatactatgtcagtgccacactgtcttgattactgtagctttgtggtgagttttggaattgggaagtgtcagtcctctaactttgttgtatatattcttttctgttttgcacagatatcaggttacaaatattttgcacacttttttttttttttgaaatggagtcttactctgtcacccaggctggagtgcagtggcgcgatctcagcccactgcaagctccgcctcccaggttcacaccattctcctgcctcagcctccccagcagctgggactgcaggcgcacactgccatgcccagctaatttttttgtattttaagtagagacagggtttcactgtgttagccaggatggcctcgatctcctgacctcgtgatccgcctgcctaggcctcccaaagtgctgggattacaggcgtgagccaccgcacccggccttgcacatgtttttaaaacttaatacataatagcttatcctgtatcaattaacatagctactttatttattcttagggccgcatagtatttttttttctttcttttttttttttttttttttttttgagactgagtctcgctctgttgcccaggctggagtgcagtggtgtgatcttggcttaagcaacctctgcctcctgggatcaagcctcgggatcctcctacctcaacctctgcagtatttgggactacagacacctgctaccacacccagttaattttcgtatttttttgtagagatagggtctctattgatgtgcatttaggctttataatatttatatatatattttttgaaacaaagttttgctcttgttgcccaggctggagtgcagtggcatgatcttggctcactgcaaccttcgcctcccaggttcaagtgattctcctgccttagactcccgagtagctgggattacagtttttaaaaaatgtatcctaggctgggcgcagtggctcacgcctgtaatcccagccctttgggaggctgaggcgggtggatcacctgaggtttggagtttgagaccagcctggccaacatggtgaaacctcgtctgtactaaaaatacaaaaattagctgggtgtactggcgggcacctgtaatctcagcttcttgggaggctgagacaggagaatctcttgaacttgagaggcggtggttgcagtgagccattgcactccagcctgggtgtcaagcaaaactctgtctctctctctctctgtgtctctctctctctctctgtgtgtgtgtgtgtgtgtgtgtgtatatgtatatatattctgccaatattttgtgattagagagtttaaagtatttacatttaaagtaattactgataaggacttttgccattttgctactacttttatgtttagctgatttttttttttttggtagtgaaaaaaaattttttttttttgagagcatgagactgttgcctaggctttggtgagcaaaatagtgcagtgccacaatctcagctcactgcaactttgggctcaagtgatcctcctgtcccagtctcctgagtagctggtagtataggtgtgccaccaccatgcctggctaatttttgtattttttgtagagatagggttttgccatgttgcccaggctggtctcaaactgggttcaaacaatctacctgccttagccttccaaagtgttgggattacaggcattagccactttctgccccctcccccgcttttttttttttttttttttttttgagacggagtttcactcttgttgcccaggctggagtgcagtggcatgatttcagctcactgcaacctccgcctcccgggttcaggcattttcctgcctctgcctcccaagtagctgggattacaggcttgccaccatgcctggctaattttgtatttttaatagagatggggtttctctatgttggtcaggctggtctcgaactcctgacctcaggtgatcctcctgccttggcttcccaaagtgctgggattataggcgtaagccatcacgcctggcccacgctttatttttttatttttattttttattatttatttatttattttttgagacggagtttcgttcttgttgcccaggctggagtgcaatggcataatctcagctcaccgcagcctccgcctcctgggttcaagtgattctcctgcctcagcctcctgagtagctgaatttacaggcatgcgccaccatgcccagctaattttgtatttttagtagagacggggtttctccatgttggtcaggctggtctcgaactccagacctcaggtgatcctcccgcctcggcctcccaaagtgctgggattacaggcgtaagccaccaggcctggcctgcttttttaattttttatttattttttctttttaagagggagggtcttgctgtgttgtccagattggagaacagtgatgagatcatagctcactgcagacttggattcctggactcaagcaatcctcccgcttcattctttgcaagtaactggaagtgcagacatgtgccacctgccttttttgttttttaaatttttcatagagatggggtcttgctatattgcctaggctggtctcaaactcctggcctcaagcaatcggcttcctgaagtgctgggattacagatgttagccactggcctgttgtgaaaatgttttgactttcttctcattttctttctttctttttttttttttttgaagtagagagagtctcactatatggccaatggtggtttcaaacccctgagcccaaggaatcctcctgcctcagcctcccagtgcttgtcgtgctaggacaacaagcatgagccactgtgcctagccccttctcattttctttttctttctagtgcataagcaggcaaccttattttcttatgtgtatattctaaagatatgttctttgcagttaccatgggaattacacttaacatctcacagttataatctaatttgaatttatactaacttaagttccatagtatacaaatctctgctcctatccagctcctttctcttcccttttctgttaagtcatggattacatctttgtaaatcgtatctcaggaacctagattaataattttttatgcatctgtcttttagatcacattgaaagtgaaaagtaggagttacaaagcaaaattgcaataatgctagtttttacagttgcccctgtatttgcctttaccagagatctttctttcttttttttttttttgggatggagtctcgctctttcgcccaggctggagtgcaatggcgcaatctcagctgactgtaacctctgcctcccgggttcaaaagattttcttgcctcaggctcctgagtagctgggactgtagttgtacgccaccacacgtggctgatttttgtatttttagtagagatggggttttgccatgttggccaggctggtcttgaactcctgacctcaggtgtgagccaccgcacctggccgagatctttatttcttcacatggcttcacgtctagcttttaaaaattcattctgggccgggcgcagtggctcacgcctgtaatcccgacactttgggaggctaaggcgggcggatcacgaggtcaggagatcgagaccatcctggttaacacagtgaaaccccgtctctactaaaaacacaaaaggccgggtgcggtggctcacgcctgtaatcccagcactttgggaggctgaggtgggtggatcacgaggtcaggagatcgagaccatcctggctaacatggtgaaaccccgtctccactaaaaatacaaaaaacaaaacaaaacaaaaaaaactattagctggcattgcggtgggcacctgtagtcccagctactcgggaggctgaggcaggagaatggcgtcaacccaggaggcggagcttgcagtgagccaagatcacgccactgcactccagcctgggagacagcaagactctgtctcaaaaacaaaaaacaaaaaaccacaaaaattagccgggcgtggtggcgggcgcctgtagtcccagttactcgggaagctgaggcaggagaatggcatgaacccaggaggtggagcttgcagtgagccgagatcgctcaactgcattccagccttggcaacagagcgagactccatttcaaaaaaaaaaaaaattcattctgaagaattcctttttttttttttttttttgtaaaaatggagtctcactctgttgccctggctggagtgctgagtgccatggcatgatctcagctcactgcaaccaacccccactccaagttgaagcgatactcctgcctcagcctcctgactagctgggattaggggtgcctgctactgcacctggctaatttttgtatttttagtagagacgggtttcaccatcttggccaggctggtgtcgaactcctgacctcgtgaccaacccacttcggcctcccaaagtgctgggattacaggcgtgagccactgtgcccggactgaagaattcccttttagcatttcttacaaggtctgtatagtggtaatgagcctccctcagcttttgtttatctgagaatgtcttgatttttttccttttttttttttttttttgagatggagtctcgctctgtcgcccaggctggagtgcagtggcgtgatctcagctcactgcaagctccgcctcctgggttcacaccattctcctgcctcagcctcgtgagtagctgggactacaggtgcccgccaccacgcctggctaatttttttttttttttttgtatttttagtagagacggggtttcactgtgttagccaggatggtctcaatctcctgaccttgtgatccgcccgcctcggcctcccaaagtgctgggattacaggtgtgagccgcctcgcccggccaatgtttttccctattttttgaaagacagtgttgccatttacagaattcttggttggcaatttatatttagggtttttttttttttttttgagacagagtcttgctctgttgcccaggctggagtgcagtggtgtgacctcggctcactgcaacctccgcctccagggttcaagtcattctcctgcctcagcctcccaagtagctgggactacaggtgcccgccactacgcctggctaattttttgtatttttagtagagacggggtgtcaccatgttggccaggctggtctcgaactcctgacctcaagtgatccacacgcctcagcctcccaaagtgcagggattacagacatgagcccccacgcccggcctaggtcttgtatgatcatacattttgccttggcattcatatggctttctaaatttcaccatatacatgttgctttggaatgtcctaatttgccaaagagtttcacctcaacttctgtgggcatctatctgtaatctcttgccccaagtgcctgttagtctgtagtctgctttgcagctttcattagcaatacctgctgctttctctgcctgagttttgtattaggttgaaatagaaacatgcaccttatgtctgtccttcaaatacccccgcagacagggtagaacagatatgtacgataatttgcaaataaggtctgctttgctctttgagggagggagctgggaattgggcttctactgctttaagacaaaaaacactgccatgctggagagggggtagggcaaggttgagtaaaacaccacagaactttccttctgttttgaagatggctttttcttcattggatatttgcttgtaaacctttgactcttttctaaaactgtcaaatttggttcagacagttactacttgtttttctgatgtttctatgaaggaatgagaccttgaaacttcctagtctgccattttgatgacctatgggctgtctttgtactctcttgatagtgtcctttgatacacagaagtttttaattttggtgaagtccctttatctactttttcttttaaagttccttgtgctgtaggggtcatatttaagaaatcattgccaaatccaaggtcatgaagatttgcctctttttcagtagctataacaaaggtcctggaaataacttcttatcttgacttgagttacatgtctgtcttcaaagcaatgactgtggtgagggtaatagattattccgattgctcatgctggatggtgtccgatcaggtctgagacagtggggttgatactacagtgctgtttccaaaaaggaagggctagtgagcgctagaaaaatcagtaaatacttacttcatgtagtaaatgtgaagcattcatagcacattgaaaagtttatggtgcccagagtacctttttttttttttttttttgagacagcctcactctgtttcctgaactggaatgcagtggtgcgatcttggctcactgcagcctcaacctcctgggttcaagcgatcctcccccacttcagccttccaagaagctgagactacacatagtcatcatgcctgactaatttttgtatatatattttttaagatggagtctcgctctgtcacccaggctggagtgcagtggcatgatcttggctgactgtagcctccgcctcccggtttcaagcgtttctcctgcctcagcctcctgcatagctgggattacaggtgcctgccaccacacctggctaatttttgtatttttagtagagatgagatttcaccatgttgcctaggctggtctcgaactcctgacctcaggtgatccacctgcctagcctcccaaagttctggtaatttttgtattttttgtagagatggcattttgctatgttgcccaggctggtctcaaactccttggctcaagcggtctgcctgccttggcctcccaaagtgttgaggttacaggtatgagccaccgtgcccgaccccagagtacacattttaattaaaaacttatttttctggccgggcacggtggctcacgcctgtaatcccagcactttgggaggccgaggtgggtggatcacaatgttaggagttcgagaccagcctggccaatatggtgaaaccccatctctactaaaaatacaaaaattagccgggcatggtgacgcgtgcctgtagtcccagctactcgggaggctgaggcagaagaatcgctcgaaccggggaggcagaggttgtggtgggctgagatagtgccactggactccagcctgggcgacagagagagattctgtctttaaaaaaaaaaaaaaagtatttttcttattataaatttaatatgtaagtgatgtaagtgtttgaaagtgacttccagctggatgcggtggctcatgcctgtaatcctagcactttgggaggccgaggcgggcggactgcttgagctcaggagtttgagaccagcctgggtaacacagtgaaaacccgtctctactaaaatacaaaaaaattagctgggcggccggcgtgcgcctgtagttctagctacttgggaggctgaggcaggagaattgcttgaacccggaggttgcagtgggctgagatcgtgcctttgcacttcagcctgggcaacaaagcaagactccatctcttaaaaaaaaaaaaaaaaaagaaggccgggtgcagtggctcacgcctgtaatctcacactttgggaggcctaggtgggcggatcatgaggtcaggagatctagaccacagtaaaccccgtctctactaaaaatacaaaaaattagctaggcgtggtggcgggcgcctgtagtcctagctactcgggaggctgaggcaggagaattgcttgaacccggaggttgcaatgggctgagatcatgcctttgcactccagcctgggcgacagagcgagactccatctcaaaaaaaaaaaagaaaagaaagaaaagaaagaccttcaaaattattgctgctgatgtggtccctcataaaccaagcagtgggaaactggtttagcttttagttcacattctaaagtactaatttttgtggtttattttgtacaggtactgctataaccagaatttggtagaaaaaggatttacttgttggggccctcttgataaaaagagatgtggggggattctcgacctgctaacagaactggaccttttcggtaagttctcaaatttgaatattgaaattgccagtattttaattataaatgtgtaacattttcgcctactataaatgaagatattttctctgtggagaaatagtttctgattttttaaaaatagaaatttggctgggcgcggtggctcacgcctgtaatcccagcactttgggaggctgaggcgggcagatcatgaggtcaggagatcgagaccatcctggctatcacggtgaaaccccgtctctactaaaaaatacaaaaaaaactagccgggcgtggtggcggctgcctgtagtcccagctactcgggaggctgaagcaggagaatggtgtgaacctgggaggcggagcttgcagtgagccgagatcgtgccactgcactccagcttgggcgacagaggaagactctgtctcaaaaacaaaaacaaaaaaaaaaaaagaaaaaaaaagaaaaatagaaactcaatttggaaaataatttcgaaaatgattgtgagcctgaatacccagcatgccaaatgttttgtcacatagcattttaaaattttatttatttgtttgttttttgagacaagtctctctctgtctcccaggctggagtgcagtggtgcgatcttgacttactgcaacatccgcctcccgtgttcaagtgattctcctgcctcagccttctgagtagctgggattacaggcgcgtgccactatgcctggctaatttcattattttaatattaaaaaatacccaaatattttatttctttttgtctcttagcgaaggaatacatatttggctagtaaggaaagctagcaaaatttacataaatgtttataaaagttgtattgagttcactaatttatgtctagaattcagagctgtgccttgtctgtggcatgttgacgcagtttgctaagccacctctcaattttaggggttacttggtaccaagaagagtggagaaagtggtagcatttagttgtaaatagattgtattttaaatttgtagggaattaatttttttatagctagtatcatacacactgtattttaactagtatttaaacatttttcgtattgtgtttacaattaatgagatgctatatgaatgtgacttttttggttttacttggtacatagcaaataaatctgacctttaaatgtatgcattcataagtattgttgctccagttgaaacttctattaactagtacattttcctttttttaccttttttcaaaatggagtctcactctgttgcccatgctggagtgcaggggtatgatctcagctcactgcagcctttgcctcctaggttcaagtgattctcctcccttagcctcctgagtagctgggactacaggtgtatgccaccatgcctggctaattattgtatttttttttttagtagagatggcgtttcaccatgttggccaggctgatctcaaactcctgacctcaagtgatccacctacctcagcctcccaaagtgctgggactataagtgtgagccaccgcacctgccatttggattggcaatctgcaagattttattacttaaatgcaacagatgttctcattcattgttctgaagcttggagttccaatgaaaaatttaggtggagaactgagtttagaaaatccatataatgtttagtaaaactagtatttcataaatgctgaatgacagagattggtctttaaattaaaacaacagtgtgatgttgggtattttttttctttcaaaatactaaggattagatcagtggtcagcaaactacagctgatagcctgtttttgtaaataaagttttactggaaaacagccactcttactcatttgcagattgtgtatggctgctttcatgctatgatggcagagttgaatagttgtaacagagattgtataacccacaaaatccgatatgtttacgaactggctcttcatggaaaaagtttcctgacctctcatctagatcaatggggttgtacgttaccatttaaaaatatttaggttgtaatctatcctcttattacttgtatttatgggtaactattttgtaagtaaggctgtttcgtatagaattaacgtggtttaggtaagcattcagaaatgttaggttaatttagctttattgtctaacttttttcaaatttagaacatttgtctttgactcgtttaaacttatttaaaattatattttcccaccttaattttagtttaaatgtaagtcattatatgctgttttttaacatctttgactaggagggagacagtttttgggaactaatttgaaccaaaacagatataggaaaatgattttgttacatttcctttgaacttttcttttaaaatttgtttttatttggttgaaaataattttcataactactgatattttatattagtagaatggtttcttgattcgtctgtataaaatacaaatctaagaaccctgctacagtaagttactctaaatctatttgatcttaatttagaagagtaagataatctttaggccatgttggatgtgttctggtcagaaaacatgtagatttcatacctcagtcctcatcccatgagtgtctgatgaagcttaaatcttcctgcaagaaagacttgaatgattttaaacatgagagacactgtatttagtggtaacatcttaattttagtgttaaattgtattgcctaagaagaacatctagggcgggcgtggcggctcacgcctgtaatcccagcactttgggaggccgaggcgggtggatcacgaggtcaggagatcaagaccatcctggctaacacggtgaaaccccgcctctacaaaaaatacaaaaaaattagctgggcgtggtagcgggcgcctgtagtcccagccccttgggaagctgaggcaggagaatggcgtgaacccgggaggcggagcttgcagtgagccaatatcgcgccactgcactccagcctgggcgacagagcgagactccgtctcaaaaaaaaaaaaaagaagaacatctaaacttgctcctcttatgatgaaccacatagacataactagtgttaatgggggtcagtggaagtcatcatgttctgaaaatccattaaatgtacatcattctagtgtttaggttaatgctgttaaattcctgttactttaagaaagggttggccgggcatggtggctcacgcctgtaaccctaaccttggggagacagagatgggtggctcacctgaggtcaagagttcaagaccagcctgggcagcatggtaaaaccccatctctgctaaaaataaaaaaattagctgggcatggtggcgcatgcctgtaatcccagctactctggaggctgaggcatgagaattgcttgaacccaggaggcagaggctgcagtgaaccgagatcatgccattgcactccagcctgggcaacagagcgagactccgtctcaaaaaaaaagaaaaagagaaagaaaaggtttggcattgcaactatttctcttgaactgagtgacccagaatcanttgtcctttgaattttagtatagtagcatagtctgagctcagaagggccttatgatagaccctgtatgttctgggaggcaagaattgagttggtattaatatcttaatgcttttgttttactgctgaataacagatgacccttcaggtcttttcatgttttcctttttcatgtctccctgcctaggatcctaggtgcctaattgcctacttaaactagtttagggaatcttggactgaagccaaaacatgtaaaatgccctgaaggttaggcaaagggaagaagttgggtagtatgaaagattaggtcacatcttgtttatctcttgagttctataaattgagaatgtaaatttaatactatgtctatttttaaaatgtattttattgccatgaaaaagtagcatgagacattggaatatggaatatcagcttcttcatttgggtcatggggatcatgcttgaagacctaatgctctctctaggtctatctcagcattgagcccctggatgctgttgcgtggcttagatgacttatacatgctttgtggcatgattcatactaccttctaccttctgtgatacccttgggtagttataataggacccaggttagagtgcttcttggtggagccactgtagaactgggatttagatgcagccagggctgatgctcagctggtgaacactggtgtgcttgttcctactggtgatttacaaccagtgtttcttctttttgggcctgcatccattttgattgggtggtgtccatgctgtatctgtaataaaatatttttgaatgttaccgctggatgcagcgtgagaaagatacctcctgaaacttactgtaagaaatttacagtgcattgatttttctgatatataggaatcgtcatgttgaccttggaattcttaagttccctggctgtaggaaatggaaatttttgtagtatgtcaccattgttagcttatttggtattgcggattttccctgttgcaggactgggtgaaagctttttctgcagcagtcatgttgaaaaccttgtgttgactttcctcgtgttctgaaatgggagcataaaagtttactccgccacttcgtcttaaaatagcaaaactttgctgttttctgcagatctaggaccttgttacagaactctgccaaaaaaaaaatgtttacagaagaatgtgctgtgattagagaagaatatgctggtgtgtagatttcaaactctctggacaatatgaataacactgtctttgtttctacagtgggagccaagaagaaaggtttgctcccgggtggaacagggattatcctcctcctccccttaagagtcatgctcaagagagacactctggcaactttcctggcagagattcacttccctttgatttccaggggcattcggggcctccttttgcaaatgtagaggagcattctttcagctatggagctagagacggaccgcatggtgactatcgaggaggggagggacctggacatgatttcagggggggagatttttcgtcttctgatttccagagcagagattcatcacagttggacttcaggggtagggacatacattctggggattttcgggatagagaaggaccacctatggactataggggtggagatggtacttctatggattatagaggtagggaggcacctcatatgaactacagagacagggatgctcacgctgttgacttcagaggtagggatgctcctccatctgacttcaggggccggggcacttatgatttagattttagaggccgggatggatcccatgcagattttaggggaagggatttatcagatttggattttagggccagagaacagtcccgttctgattttaggaatagagatgtatctgatttggactttagagacaaagacggaacacaagtagactttagaggccgaggttcaggtactactgatctagactttagggacagggatacgccacattcagatttcagaggtagacaccgatctaggactgatcaggattttaggggcagagagatgggatcttgtatggaatttaaagatagggagatgccccctgtggatccaaatattttggattacattcagccctctacacaagatagagaacattctggtatgaatgtgaacaggagagaagaatccacacatgaccatacgatagaaaggcctgcttttggcattcagaagggagaatttgagcattcagaaacaagagaaggagaaacacaaggtgtagcctttgaacatgagtctccagcagactttcagaacagccaaagtccagttcaagaccaagataagtcacagctttctggacgtgaagagcagagttcagatgctggtctgtttaaagaagaaggcggtctggactttcttgggcggcaagacaccgattacagaagcatggagtaccgtgatgtggatcataggctgccaggaagccagatgtttggctatggccagagcaagtcttttccagagggcaaaactgcccgagatgcccaacgggaccttcaggtatgttgatggggtggattgcttttttttttttttttttttttttttttgagacggagtctcgctctgttgcccagcctggagtgcagtggtgcgatctctgctcatgcaagctccgcctcctgggttcatgccattctcctgcctcagcctcctgagtagctgggactgactacaggcgcccaccaccacgcctggtgtgagccaccgcgcccggcctgctttttttttttttctttaaataagacttttgtgaaggatgacatttatttatttatttatttatttatttttgaaacggagtcttgctctgtcacccaggctagagtgcagtgacataatctcagctcactgcaacctccgcctcccagggtcaagcaattttcctgcctcaacctcctgagtagcagggattgcaggcatgtgccaccatgcccagttaatttttgtatttttagtgcagatggggtttcaccatgttggccaggctggtctcgaactcctgacctcgtgatccgcccacctcggcctcccaaagtgctggaattacaggcatgagccaccgtgcctggccagtttttttttttttttttcattttatttttatctttgcataaccattagaaagcaaaatttgtattcaggagtggaatgtaggaatgtaaatctctagagaaaaggtcctcagctcagatcatatatatgtgtgtgtgtgtgtatatatatatatgaatatatatgtatatatatgaatatatatttatatatatatatttcttttttcttttattcttttcttcctgcttcactttccatttgtgtatatatgtgtgtgtatatatgaaggaactatatatatatatatttgagacacggtcttgctctgtcactcgggctgaagtgcggtggtgtaattatggctccttgcagccttgacctcccaggctcaagcgatcctcccacctcagccttctgagtagctggaactacagatgtgcgccagccactatgcctggctagtttttttttttttcctttgagaatgagtcttgctctgtcgctcaggctgaagtgcagttgtgcgatctcagctcactgcaacctctacctcctgggttcaaggggttcccccgcctcagccttccaggaagctgggactacaggtatatttcaccattcctagttagttgtgtttttttttttcttttttgagatggagcctcaccgtgttgcctaggctggagtgcagtggcacgatcttggctcacagcaacctccgcctcccgtgttcaagcagtcttcctgcctcagcctcctgagtagttgggactgtagttgtgcaccaccaaatctgactaatttttgtattttttgtagagatgaagtttaggcatgttacctaggctgggctggaacccctgatctcaaatgatccacccttctcagcttcccaaagagctgggatttcaggcatgcaccaccatgcctggccagcaatttttgtatttttttgtagacagaaggttgcaacatatttcccaggctggtttcaaattcctgggttcaagcagtccccccaccttagcttcccaaagtgctgggattacagcaatgagccactgcccctacccttttgatgtgtgtttattcattattttgttttatgatgctgatttacatgccttgggataatttagtttgaaagtatatgtctttgggagttgactcttgcaactctcgcttagttagacctgtgattgtttagggatcattttcttatttaaattcattgagagaatacttaggagtctccctagttgtgaagagctgatattaatgttgcaactatcctcttgcagctaacgtaattaacttaaatgttaaacttcttgaatatatgatttaagcaaggagggttatatttgtaattttacaatgaaggtattctcttttaaagtagatttggctgggtacagtggcctatgcttgtaatttcagtgctttaggaggctgaggtgggaggatcacttgaggccaggaacttgagaccagtgtggtgcaacctcaggagagaatgtgagggtggggaagaaaaataaggccaggcacagtggctcatgcctgtaatcccaacactttgggaggcaaaggtgggcagatcatttgaggtcaggatttcaagaccagcctggtcaacatggtgaaaccccatctctactaaaaataacaaaaattaggccaggcgtggtggttcttgcctgtaatcccaacactttgggaagctgaggcaggtggatcatttgaggtcgtgggtttgagaccagcctgaccaacacggagaaaccccatttctactaaaaatacaaaattagctgggcgtagtgatgcatgtgtgtaatcccagctactcgggaggctgaggcaggagaatcccttgaacctgggaggcagaggttgcggggaggcagaggttgcactattacactccagcctgggcagcaagagcgaaactccatctgaaaaaaaaaaaaaaaacgaaaaccaaaaccagccaggtgtggaggtgggcgcctgtaatcccaactacttgggaggctgaggcaggagaattgcttgaacctggggggcggaggctgcagtgggctgagattgtgccactgcactccagcctgggcgacagagcgacactctgtctcaaaaaaaaaaagacattatctagtcatcttctctcaccagaggtatgaagtactgctagtttacagcccattctccagctctcagaccagggaaatttttctttttttttgagacgggggtctcgctctgtcacccaggctggagtgcagtggcacaatcttggctcactgaaacctctgcctcccaggttcaagtgattcttccgcctcagcctcctgagtagctgggaccacaggcgtgcacagcacagttggctaatttttgtatttttagtagagacggttttaccatgttggctaggctgagaaaattactgttttgagactatgttagtgtgtctttctggttattaaagtcttactcagtcttgtctctcgtaatgttttgctttactttgaagactctttcagtgagacttggtcttagcacatttacattcttatgatttgaagtcacattctggcactcagaacaatagagaaaattgtaattttttatatcttcacgtgacatgtcattatcatttttgatcctgagtggctaaatttcatgttgatttgtgttttgtgcagtaaagtatatttgtgaaataatttttcattctcaatttaaggatcaagattataggaccggcccaagtgaggagaaacccagcaggcttattcgattaagtggggtacctgaagatgccacaaaagaagaggtaaggcatgtcttctctcctgtttctctgtgtcaattaaaaattaaaaaaaccttttaatttgaaaaattgtagattcacaagaaggtgcaaagaaatgcacagagaagtcttgtgtatttttttcccatcttccctcagtgttaatattttgcacaactgtggtatagtatctaaaccaggaaattgaccctggtataatacataaagtttattcagatttcaccatttatacatgcactcactgaggtgaggttaaaaaaaattatgacaaatgattgctctctttagacctgatcacatcctttagagcatattatttctggagtatgtacataaggatgcagtttatttacaatagtaaaaactagaaactgcctaactgccctgtatcaaaggattggctgactaaattaagtctgaacttatggcagtgctcgctctgtgccaggcattgtgtgatacttacaagcattagttcatttaattatcacatatttaatataatcactctaaatattaagcattactgtatgtaattgttctagatactgagtgacacagcagtgtatattatcaagtcactgcctccatggataatgaaaaagcaagcaaaaggattacacaattttagtcagcaaataaatactctgaagaaaactaaagtacaggcggggcatggtagctcggcctgtaactcggagacagagtcttgctttgtcgcccaggctggagtgtgtggcgcgaccttggtgcactgcaacctccacctccccagttcaagcagttctcctgccgcagcctcccgagtagctgggactacaggcacacaccaccacgcccagctaatttttgtacttttagtagagacggagtttcaccacattggtcaggctggtcttgaactcctgacctcaggttatctccctgcttctgcctcccaaagtactgccattacaggcatgagccaccaagcccagcccatttttgatttttttgaggcagcgtctcactttgttgcccaggctggagtgcagtggcacaatcacggctcactgcagcttctacctcttgggctcaatcgatcctaccacctcagcctcctgagtagctgggaccacgggcatgcatgctaatggggctgttttttgtattgtgtagttagggagacatcactgaggaagaggcattcgagcccaggcttgaatgccgtgagagaacagtttatatgaatatggggaaatgaactgcccaggcagttcatgctgaggaagtgctgtggccctggactgtaatgaacccagtacatcattttatatttaacacatgagaaactggacactaaaaggttacacagcaagtgagcagagagcttggaatgcacacagtatgatttcagagcttaagcctttgaaggttatgctcttctgcttttctttttttttttttttttttgagacagagtctcactctgtcacccaggctggagtgcagtggcgcgatctcggctcactgcaacctctgccgccagggttcaagagattctcctgcctcagcctcccaagtagctgggattacaagcacctgccactgcacccagctgatttttgtatttttagtagagatggggtttcaccatcttggtcaggctgatcttgaactcctgacctcaagtgatccacccgcctcggcctctcaaagtgctgagattacacgcatgagccaccgcgcccagcattttgtttgtttgtttgtttgtttgtttttgagacagagtcttgctctgtcacccaggctggagtgcagtggcacaatcttgggtcactgcaacctccgcctctcgggttcaaatggttctcctgcctcagcctcctgagtagctgggactacaggcatgtgccaccacgcccggctaagtttttgtatttttagtagagacggggtttcaccgtgttagctaggatggtctcgatcccctgacgtcatgatccgcctgtctcggcctcccaaagtgctaggattacagatgtgagccaccgcttctggccctgcttttcctatgtacctgagaatttttaaatatttatttatttatttttgagacagggtactccagactggagtgcaatggcccaatcaaggctcactacagcctcaaactcctgggctcaaactatcctcccgagtagctgggattataggtgtgagccagtactcctggctaattttttttttttttttgagatggagtctcgctctgttgcccaggctggaatgcagtggtgcgatcttggctcactgcaagctccttctcccgggttcacgccattcttctgcctcagcctcccaagtagctgggactacaggtgcccgccaccacgcctggctaatttcttgtattttttagtagaaacggggttttaccgtgttagccaggatggtctcaatctcctgaccttgtgatctgcccacctcggcctcccaaagtgctgggattacaggcgtgagccaccgtgcccggccaattttttttttttttttttttttttttttttaaagatagtgtctcgctctgttgcccaggctggagtgcagtgtcatgatctcagctcactgcagcctcagccttccaggttcaagtgattctcctgcctcagccttccaagtagctgggattacaggtgtgtgccaccacaccaggctaatttttgtatttttagtagaaatggggtttcaccatgttagccaggctggtctcgaactcctgacctcaggttatccacccgccttggattcccaaagtgctgggattacatgtgtgagccaccacgcccggtctctcctggctaattaagaattttttttttttttttagagatagggtctcactatgttgcccaggcttgtctcaaacatgtggctttaagcaatcctctcaccttggcctcccaaagtgctgggattataggcaggagccactgcatcccaccaatttttgaataattatgttctactcattcaatatgtgaatgccttgagtgttcatagtttaactttgcttttccaaagtaatcatggctttaaattatgtatgataaaaactgttagggaaaatctgatattcagtgtttgattatgatttgtatcatttgtataaatgccatatttttgcagattcttaatgcttttcggactcctgatggcatgcctgtaaagaacttgcagttgaaggagtataacacaggtgagtttcttgacttgcatatggccttgggttaggaagggtctttgtcagatctctgcatcatgtgctacttaaaatttgtttcaagaaaccacaattaaaatttccagaagcctcccgttggtgcctccaaataacaaccagctttagttttagctgtggttctttgtggatgtttgtccacacatgggtgatgaggatgcatgttccagttcttctgaatgcctgtgatatatagagtgttgcagcaattgccttgaatatattttatataattattaaacttgctatgcatgttcttcatggtggtggaatgtttatgcttgagcctaataggatttaataagcttgttgtatgtaaaattttacattcattgcttcagtaaaatttatgacttcccagagaaattgtacaaattagtggtttaattttcagttttgctttgagaatggagtcctgttacagttattttgttgaaatccatgaatagacccagaagagctttccctttgacatctgttctgtggtctgaatggtagattaaacttttcagaatatcctcctagttgtatttcacagtaccaatttcagtcatttcctttaaatcttactacagtaaaagtaggcaaaggtgaaatgccaagaactcaaggtttttgaccaatatttttagaactatgtataataataagtttatttatttaaaaataaaggtaatctttaggtgacctattttgcagaattttaaatggaagggaatagagcatgagtcttcacagaacttagaatttcagtaattcagttaaagacatcttcaagtaagaacatgtcatattttgaggatataatttactattagcagtttatcatgggataaaaattttgcattaactagataacttcttcagaatgcttctgcagaggaaaattatccacaaaataaattttggtgcttgaaagaatatggtgttaagttcagaaataatttgttctgtaatttgagaacaagctcagaagtattatttctcagagagccaattatttatttgttttaaaaacatcaaccctgaatttgtggaagcatgagtaagagtagatatattattattcttggtatctcacttatgttggttatatttattttttgcatatgccttatacatgctttctttgggaactcaaggtagaatttacaggctggagatgctttttaactctcaggataataacctcagtctggtttcatgaactgtgctttcattaagtattgatatgtttaggaaaggagatgtcttaatatttaaatagcagttcaaactccagtttctttagtattcattgactttctaattgtcaaatttgtcaggacagtaaaaattgtattaacatatagtgtctagagaggaagttcttaaatttgccgattgtggtagctgttagaattggcagactgaagacattgatacacatgggaaatcattcagggcagtgcttaaaaataaaacgaaaaatacctttcagcaaatacaatcttttcttggcattctgttaagttgtgttttttatttttgttttttagtgaaagaattggattgctagtttcatgttatttatattacatctctatgtgacaaataggatgaacttttgacaatatcagccagatcatgttactcccatgtctaaaaccctcttagggccttcatcttcacttggaagaaattcccagcttcttcttttgtcttacaaacccatgcgtgagctgacccttggctgtttgatctcattcagtactgccctccacctaccctattttgctgtagccacactgagcttttctcttgtctttgaccaatacaaacttctttctgtgtcagggtctttgcactactcttctctctgatctttacttgtcttctggggtttagttcttggcttcagtttcacgtctctgaggccttgtgtcactctcaaatctaaaatcatcgggcagttgttttccatcatatccttgtttggatctatcactgattggatatttctatcactggtatttttcagttggatctatcactgatctatcactggtcactgattggattgaatctgtcagtggtattggatctatcactgatatttttctccgtggttttgtgtatcttatttctctcactagagaggaatgtcagcaggagccttattccttcttgtttccaccagtgcttgacactcggtaggttccctatatgcatggaatagattattatttatggtgtatgtgaagagcagctgtgatttcccctcaggtgaggaacataaaagggtagtgtaggtttcacagcagtgcagcttaggtcttacatatctgttgaagaatatgtcttggaacaatcagatgttctaagaactatagtgtttactgttaaaagatcatatgtggtagtcaggcatggtgttgcacacctgtagtcctagctacttgggagtctgagatgggagaattttttgagcctgagaatttgagatcagcctgagcaacatagcaagaccttgtctcttaaaaagaaaaagaaaaaaaaatgtgaatcttagtagtaacagtgacttaaaaatttttttttataagagaaagggtcttactctgttgcccaggttggagtgcattggtacgatcatagcttactgtaacctcaaacccctcggctcaagtgatccttctgtctcaacctccagagtatttgggactacaggtgcgtaccaccatggcaggctaatttttaaactttttgtagaggcgcggtctcactatgtttcccaggctggtcttgaactcctgggttcaagtgattctcctgcctcatcctcccacagtgctgggattacagatgtgaaccagtatgcacagacaaaaaggtgacattcataggtgaaaactggtaataaatattttaggctgagtgatgacctgcagagaccatgcaggatggatattgctcataagaggggaattgtggagtacagtctgtcctgttagttgatgtaatggagggctgatctataacacaggagagaagattaacgcctcttcgttgactctagtaatgtattagtgtaatttttgtctcctctagagctgtataagtacagggtcacaattttatctagaacctgtgaggttaaatgagcttatgaatttttcaagttatagaaatgtagtttacatagatcatatgggaattatatctcccaggggaatgtgtactcagacataatacttacgctgcaaaattattaatattctcactaacaggagtaaataaagtctcacagtataggccaggatttgcctcaaaatgagtttgttgaattttaccaaaaaacttgacatttatgggattttggaattgtagataagagattttggacctatatatgttgtgtatatttgaatttttcatttgccatttacaaatacattataaccccatgaattgtaaattatcttgaattatatgattatttctggaaaaagtaccaggagtaaaatgtcttttggtgactagacaaactctagtatatatataaaatggaatacttctcagcaatgaagaagaaactactcatgcacctaacaacatggatgaatctcaatggcaatatgctgagtgaaagaaactagactcataaggatatatacactaccataaggaggaatgaaatactgatgtatgctacaagttggatgaaccttgaaaacattataaaagaagccagacacaaaagaccaaatattgtgcaattcagtttatatgaaatatctagagaaggcacacccgtagagatagaaagcagattggtggttgccaggggctaagcgggaatggggaacgactccctaatggttatggtacttcttttgggctgatagaagtgttctggaactaggtagtagtgatggttgcatgacattgtgaatgtacttaatgctcctgaattgtacactttaaaatgatgcattttatttgatgtgtatttgcttactttgttttttttttttttttttgagatgaaatcttgctcccgttgtgtaggcaggagtgcagtggcatgacctcggctcactgcaacctccatctcccgggttcaaacgattctccttcctcagcctcccaagtaactgggattacaggtgtgtgccaccacacctggctaattttttgtatttttagtagagacggggtttcgccatgttggccaggctggtcttgaactcccgacctcaggttatctacctgcctgggcctcccaaagagctagcattacaggagtgagccactgtgcccagccagcttacaattttttaaaaaggctacatactatatgtgtatgtgtgatttcacttatgtgacattctggaagggacaaaattttagggattggaaatagtggtggccagggtattgggggaggagttaactataaagcggaagcatgagggaatttttgggtataatggaattgttctatatcttgattgtggtgatgatgtatcaatgttaaattccccgagttgataactactgtggttatgttagagaacatcttttttcttttctttttttttttaaacggagtctcgtttggtcacccaagctggagcgtaatggcgcgatctcagcttactgcaacctctgcctcctggattcaagcaattctgcctgccttaacttcctgagtagctgggattacaggcgcctgcccctactcctagctaatttttgtattttttttagtagcgacagggttgcgccatgttgaccaggctggtcttgaacacctgacctcaggtgatctgcccaccttggcctcccaaagtgctggaattacagacgtgagccaccatgcccggctgagagtatctttattcttagaaaatacataatgaagtttttagaagtaaagtactgtgatgtatgcagctttctctcatggtttcgaaaataatacttgctataaatggagaaggaaggaagagagtattgataaagtagatggatcacaatgttattaatagttgaatctggggccacacgcggtggctcacgcctgtaatcccagcactttgggaggccaaggcaggtagatcatctgaggtcaggagtttgagaccagcctggccaacatggcgaacgaaacctgtctactaaaaaatacaaaaattagccgggcgtggtggcgggtgcctgtaatcccagctactcgggaggctaaggcaggagaatcacttgaactcgggaggcggaggttgcagtgagccaagatcacgccattgcactccagcctgggcgacagagcaagaattcatcttaaaaaaaaaaaaaaaaaaagttgaacctgggtaaagcatatatgaatcttttccctgtactattattattgcaatttttttgtaacttggaaattatttccaataaaaagttgaaaaactgacaaaactgatttattttattttattttttatttttttgagacggagtcttgcactgtcaccagtgctggagtgcagtggcgcgatatcggctcactgcaacctccgcctcctgggttcaagcgattctcctgcctcagccatcggagtagctgggattataggcgcctgccaccatgcccagctaattttttgtattttttagtagagacggggtttcaccatgttggccagcctggtctcaaactgacctcatgattcgtccacctctgcctcccaaagtgctgggattacaggcatgagccactgcgtccggcctatattttatctttaaatgatcagcagaaaccttgtaagctgaagactgcaatcaacagcttatgtcaagtaaactatagagcagtggttctcagagtggatcctggaccatcatcatctctttaccccttgggaacttgttggaatccaaattcttaagccccatcctaaacctactgaatcagaaactctggggtggggcccagtagcctgtgcttttaagaagtcctccagatatttttaatgtaccctgaggaccactggcagtagataaagtgtttgtttagattctttattctagaacttttgtatagtttaaaagtgacttaataataagcaagtggaccttttgtaagtagacaaagctaatgcttatgtgctttaggagccagtgctgatcacatgccttgcctacctaatatcagttctcctgctctgcatagcaggagaaggagctggagtagtgttggtactatcttatgactttagttatatgtaactaaggacatataacttagttgttttttctgtttatatatagtatacttcctccagagatcttggaatggttgtagatcttctcattcacacagtgtttctgtgacatatgaatgcaggcagaattgcttttgatttttaggtttgtttgcatactacgtagtatataagcttgctgtgatatttttccaaaagggatttatatcatttaagcaaaaatgatacagcttctggattatgtttcctaataaggctcaaacatagaaagtaattatagtaactgaagtgctacagaattactttagtactggtttattaactaatgtcacaaagttagaggattactaaggtggtgttagtaggaagaagcaatatcttgctttagcccgtcagtgttcatgtggtgaatggacagtctctgtattcttgggaaggaaaattcttcttggaaagtgagtatttgcaatgactaggtcagtcacttggtctgttgcctggcattttgggtctactgaaagtgacgttgtagcaaaggccctgtaccttctgcatttcttttcttttcttttttttttttttttttttttttttttggtagaaacaaggtcttgctttgttgcccaggctgcccttgacctcctgtcaagcagtcctcccaccttagcttcctgagtagctgggactacaggcgtgtgccaccatgcctggttaatgtaaatttgtttggtttttttgagacagagtttcactcttgttgcccaggttggagtgcagtgacgtgatctcagctcactacagtctctgcctcctgggttcaagcgattctcctgcctcagtctcccaagtagctgggcttacaggcacccgccaccacgcccagctaattttttgtatttttttagtagagacggggtttcatcatgttggccaggctggtcttgaactcccgagctcaggtgatccacccacctcggcctcccaaagtgctgggattacaggtgtgagccaccgtgtctggcctatttttaaattttttttgagacagagtctctctcagtcacccaggctggagtgcagtggtgcaatctcagctcactgcagtctctgcctcctgagttcaattctcctgcctcagcctccctagtagctgggattacaggcctgccatcgtgcccagctaatttttgtatttttagtagagacagggtttcaccatgttggccaggctggtttcaatctcctgacttcaagcaatccacctgcctcggcctcccaaagtgctgggattacaggcatgaaccaccacgcctggcctaaattttttttttgtagagacagggtctcacgctgttgctcaggctggtcttacactccaaggctcaagcaatcctcctgccttggactcccaaaatgctgagattacaagtgtaagacactgaggccagctgccctttacatttcttaagggtaacaggctcatgtcctttcattattcacaatttaaatattttgagtctttacttctgtgtcaatataacagaagtaacttccttacgaagaaaattccagagggaatctttcaatgtagggatagaaatccattgtgaaactcgagaattgacactgatgatataaaacatgcacagtagccgagtgtggtgatgtgtgcgtgtagtcttagctactcaacagtccgagacatgagctcaggagtttgtgaccagcatgggcaatatagtgagactctgtctcaaaaaaaggaaaaaaaaaagtgcatagtttatggtatcccaactggaggagctaaagacagaatagcttaacatcatttagaaaaaaaattataattgaaaagtgcaaatacacattttgcagtgtttttggcatttacaaaatatgtaaacacttttagtttcttagggaaaagatgacgataggctgattgaaaaatatcatttttacttgtcacatctctaaaacagcagaagttcttgtttttaaccaggagtcctatcaggtttgatacaaccttcggggaggatgtggcagttgaaatttaaggaaacttagtttccttaaggtggctgagcttaaaaaatcaaaatgtttaggaaggcaggagacactaatagggctgggctagtcttgtggaggcagtggatggacgctttggctggcctagggaagaatctgtgattcagtgctgcagggatcaggtgatcctggtgagagaggtcctggaacaagggttaatttggtcatttttggaatgacctgggatttggcttatttattttatttttaaaatttcccgctgggcacagtggctcaaacctgtaattccagcactttggaacgccaaggccagtggatcactcgagctcaggagttcgagaccaccctgggcaacatggtgaaactctatctctccaaaaaaaatacaaaaaaaattagctggatgtggtggtgcatgcttgtagtcccagctacttaggaggctaaagcaggaagatcacttgagctagggaggtgagggtggaggttgcagtgagccaagatcatgccactgcactccagcatgggcaacagagagagaccttgtctcaaaaaaataaaatggtgaatgtaaaataaaatggtagctcacgcctataatcctggtactttgggaggccgagatgggtggatcacttgaggccaggagttacagaccagcctggtcaatatggcaaaactcccatctctactaaaaatacaaaaactagctgggctggtggtgtatgcctataatcccagttactcaggaggctgaggcagaggtcacagtgagctgagatcacaccactgcactccaggctggatgacagagtgagaccctgtctaacgtgacatcacatcacatcacatcacatcacatcgcatcgcatcgcatcgcatcgcatcgcatcgcatcgcatcgcatcgcattgcatcacatcacatcacaacataacataaattttcaaggcagaaatcttgtagtcagccttactgtttgttgacaaggacacggccctgagcacagaaatctcggcagttgataaagccaagaagaaggatactaattaaagaaattttcagattttgcatcttctggcatctcagctaaatagctctgaggaggaggatgccacttaccagttttgagacacaggcaggttatattattttcctgaaaaccatttagctgagatggaatttgcctctctgaggttggggaaggtgtttgaactctgtttacagccctctgtcagttccactgccttgctgagttccctcacccttctttagatagaattgctgttggcttctatagtcctcacttacctcttttgccaaatgctcaggtagccttggctgagtcttccaggtttgataaggctgtatggggcttcctatgccttttggtagttagaagtcactgaagaggtacttctgctacagtgacaagaagaaaagggcattactcagcttgtatagtgcaagggctgcttgactcccagcttcagtctaggcaggggaatttatttatacaattaccttaaatgagcaccagatagaggccatctataaaaactgtttacaggatttaaaaatacgttgacattggcttcttcctttaactttctgcttgcaacagaacatctgatgcgacctatgctgctcactgtttctaggttacattctctacccttgcagtgtaaattaatttttgcctggttccatgtttcttgcttaggttatctcttaggtcttttgtctgatttaaatataagccttcttaggactagatagtggtgatggttgcactactttgtcaatataccactgaattgtatgtattcactcttttaagaatgagtttatttttatttttatttttattttgagatagagcctcactctgtcgcccaggctggagtgcagtggcgtgatctcagctcactgcaacctccacctcccgggttcacgccattctcctgcctcagcctcccgagtagctgggactacaggcgcctgccaccacgcccggctaattttttgtatttttagcagagacggggtttcactgtgttagccaggatggtctcgatctcctgaccttgtgatccgcccacctcggcctcccaaagtgctgggtttacaggcgtgagccaccatgcctggccttaagaatgagttgattgttcttagtctcagttgagtacattgtgttatgtatagaaaatgttatattttcatttttaaaaattattattattattttgagatggggtctcactttgtcacccaggctggagtgcagtggcacggtcttggttcactggcaacctccacctcccaggtacaagtgattcttctgcatcagcctcctgaatagcgggaattacaggcgcctgccaccaagcctaagtaatttttgtattttttttttttagtagagacggggtttcaccatgttagccaggctgatcttaaactcctgacctcaagtgatccattcgtctcagactcccaaagtgctgggattacagatgtgagccattgcgcccagcccattttaaaaaattaaactggcctggtgcggtggctcacgcgtgtgatcccagcactttgggaggccgaggcaagcggatcatgaggtcaggagattgagaccatcctggctaacatggtgaaaccccatctgtactaaaaaatacaaaaaattagccgggcatggtggcgggctcctgtagtcccagctaattgggaggctgagacaggagaatggcatgaacccgggaggcagagcttgcagtgagccgagatagcgccaatgcactccagcctgggcaacagagcaagactccgtctcaaaaaaaaaaaaaaacaaaacaaaaaaaaaccaaaacattaaaccatactctctaactgtgaagaagttgtgatttattctttagtgttacctgccattctttttgtctctttctctctcttctcttctcctctcttctcttctctcttcttccctcccttcccctcccctcccctccccttctcttttcttctcttctcttttcttttctttcagagttttgctctgttgcccaggatggagtgcattggcatgctcacggctcactgcagtgtcaacctcccaggttcaagctgtcctcctacctcaccctccctagtagctgggactatagacatgcaccaccatgcctaattattttgtattttttgtagagacgaggttttgccatgttgcccaggctggtcttgaactcctgagctcaagtgagctacctgcctcagcctcccaaaatgctgtgattacaggtgtgagccttattttattatttttttttgggacagagtctctctctgtcctccaggctggagtgcagtggcacgatcttggctcactgcaacctctgcttctcgggttcaagcaattctcctgcctcagcctcccaagtagcctcccaaagtgctgggattacaggcatgagccaccatgccaggcctctgatgcatatattttttaaaaatagtattttccaccttacagtgtatttaagagtttgtaaatttccttttttgttttctttttggaacagtgttgctctgttgcccaggctggagtgcagtgacatgatcttggctcattgcaacctccacctcccagattcaagtgattctcctgcctcagcttcccgagtagctgggattacaggtgcccgccactacgcccagctaaattttttgtaattttagtagagacaggtttcaccatgttggccaggcaggtcttgatctcctgacctcaagtgatccgcccacctcgacctcccaaagtcctgggattacggacataagatactgtgcctggctgagtttgtaaatttctttctttcttttttcttttttttttgagacagagtcttactctgtcacctgggctagaatgcaataatgcgatctctgctcactgcaacctctgcctcctgggttcaaacaattcccctgcctcagcctcctgagtagctgggattacagccgcctgccactatgcccagctaatttttgtattttttgtagagatggggttttgccgtgtaggccaggctggtctagaactcctgacttcaggtgatccacccaccttggcctcccaagcgtggggattacaggtatgagccaccacgcccggtcatcaaagataatgtttttaatgatcaggagcactttgagatgtttagaacaatctgaaacctgatttccaagccatctcaaaatatactttggtaatcaagacagggaaatgatggtgttatatcatttgtgggactcaactgattttgttgagtattgattttgctgtgggattccttgttctcttggttgtgttgggcctactgctttttaaaaaagtattttgagacagggtcttactctgttgctcaggctggagtgtagtggcgcagtctcttgtctctgcaacctcaatctcctgggctcaagggatcctcccacctcagcctcccaagtagctgggaccacaggtacccaccatcacacctggctaatttttgtattttttgtagacatgggggtcactgtcttgcccaggcaggtcttgaactcctaagctcaaacaaccgtcctgccttgccctcccaaattgctggaattacaggtgtgagccagtgcgcctggccttcttttttttttttaaccactattttttagaactagatttggcctggaaagagaaaaaagatattcctcgacttgatctatatattttatggttcattcatttgctttagaggtagaaggagcaggaaaaagtacaacaaaacaaaatcttacctttggtgtttaatttgaatgcccacagatgcttttgcatttattagtagtgagttttcataattatcaaatatgtagtagaaaaatctggctgtgcatggtggctaatgcctgtaaatccctatatgctgggaggctgaggcaggtggattttctgagctcaggagttcaagaccagcctgggcaacatggcaaaaccccatctctgccaaaaataagctgggtgtggtggcacacgcctgtggtaccaggtactccggaggctgagctgagaagattgtggaggtttcagtgagccaagattgcaccactgcactccaacctgggtgacagagtgagactccatctcaaaaaaaagaaaaaaaaatctccttgtccaggagctgtgttgagtgggctgtggactagcaggaattcatagctctggtgaaagatgactagataatgtcattttttttttaaaagtccctgaatgattgtgacagggtaggaaaatcatcacatagcaaaatcttcattagattttccctaatgacttatcaactgggtttgtgcaccaaacgaaacaacttcctgcctttgtttgtctgaaagtcaaagaaaatattattcaggtatattatattgtactccatgctacagaagtttctggcagcaatataggttatatgccaatcggttaaataatatttgtgggccaggcccggtggctcatgcctgtaatgccagcactttgggaggccgaggcgggtggatcacttgaggtcaggagttcaagaccagccagggcaacatggtgaaaccccatctctactaataaaacaaaaattagcctagtgtggtggcacacgcctgtaatcccagctactcaggaggctgaggtaggagaatcgcttgaacccggaaggtggaggttgcagctgagattgtgccattgcactctagcctggggccacaagagtgaaactgtctcaaaataaataaataaataaataaaataataataatatttgtgtaagtacagggatatgtttcttcaactccaaagtatgagttaatgtgcatatgccaactctagaaataaagtattaagtcaaaactcccaagaaaatttccccaaaaagttgctaacagacgttattttattttatttatttattttgatacagagtctctcccactgtcacccaggctggagtggtgcagtggcatcatctcgattcactgtagcctccgcctcccagattcaagccattctcgtgcctcagcctcccttgtagctgggattacagttgcccaccaccacgcctggctgatttttgtatttttagtagagatgaggtttcaccatgttggccacgctggtctcgaactcctgacctcaagtgatctgcccgccttggcttcccaaagtgctgggattacagttgtgagccactgcacctggcctttaattttaatttctaaaactatggagtaatactacattgagggaacagaattttctattccttcatttgtattattattaaatacagtcatgcattgcataatgacaggaatacattttgagaaatggatcaagtgattttttcattgtgtaaacatcatagggtatatttacacaaactagatgttatagcctactatacagctaggctatattgtatagcctgttactcttcggccacaaaactgtacagtgtgttactgtattgaacaccataggcaattgagacacaacggcatttgtgtatctaaatatagaaaaggtaatgcattgtgccaccaaatcaacaacagctatgatgtcactgggtgataggaatttttcagtgccattataatcttatggaaccattgtttcatatgcatgcagtttgctgttgatcaaaatgtagttaagcagcacatggctgtaattaaaacactattgtttgttataatagaaaataaaatttttctttttagcctctgtattaataaagagcactagaaagtactttgtttatcagataatgaatatgtttgacagatgtacatacgtatttatcaaatgaatctttttttgtgggggaaaccttaactaagaataggcctgtgttttaaaatggctgcctggaggacaagtgctataaggaaatttcagtggtatttgcttgacctggcattaagtggggggaaaaacaagccccaggtgaattgatagatggatgtctgaacatgttcaggaatgatgttttgaacaatgtttgcctcctgtgtcatgtaggcagagagatgataaaagtttttttcccctcttgataccaggtaattctgataccgactaccagaagttagcttcagactccgcaggttgaagggctttgtcccataagaccattcttacttcagacaccaattgcaatgatcagttatcaggtcccaaggttacctacacttatgtctgatttggctacaaaattggaggttcccacagtctaccccttcagatttgataactttctaatatggctgcaaaaaactcagagaaatacttatgtttatcagttttttataaaggatacaattagccagatgaggagatagatagggcaaagtccaggagggtcctgagtgttgagtgtaggagtctctgtcctgtggaatatgccaccgtcccagcatgtagatgtattcaccaatcaggaagctctctgagcccttttgtgtagttgtttttatggaggtctcattatgtaggcaggattgattaaatcattgacagtgggtgatttgctcaagcccctctcccctcatcagaagttggtgggtggtactgaaagttctgaacttctggtcaaggctttgtctttctaggtagccctcatcctgaagctatctaggggctttccaagagttgtcttattagaacaaagaacactcctatcacccttatcactcaggaaattccaagggttttaggagctgtatgccaggaacctgggacagaccaagtatctttctgtgataccacagaatgggaccccaaaagccagctccagctggtgtctagtgcctttagttgggcactggatatcggttacagggcataagtggcccagtggggttgccgtttaacccatctctgctgtattaacctcatgtaccttagctcatggctaggtcgtttcaagtctcacctaatgtcagttgtttcatccttctctggatgcatgttcacttctggaataggtgaatatctgggccactatgtttgctgtcatcctgagcaaacttccagcttagaaaccagctttatggaatcatcccagagcctttattttattttattttattttattttatttatttatttatttattttttgaggcagagtcttgctctgtagcccaggctgaaatgcagtggcaaagtcatggctcactgcagcttcaacctcccaggctcaagcaatccttccgtttcagcctcccaagtagctgagattacaggtgtgtaccacgacacctggctgatttaaaaccttttgtagagatagtgtcccagtgtgtttgcccaggctggtctcagactcctggggttaagcgatcctcttgcctcagcctcccaaaatgttgggattacgggcgtgagccactgaacttggtcccagagccttttagaacagtgttgagttgccctttatttgcaccagggctaaggcagtagaaaaaaaatgtttatgggccatgtttttcttcctagtcaaaataaaaatagccatgtaatctatggaggcagcagatatgttgttagtatacactagaagtcaggaaattcgtactgcctttcagctgctaaagtactgggacatatttgagaagcagtaatgcagaggcagctgtctgatctttgatctctgataatgcttatttcattgcatccctgaaaccaccctgcaaaggatttatcatctttgctgctttgcatatggaatagcataggcccagagagacgtagcttgactgcaatcacatggtgagttagttgtagcttctgcaaatgtacagaactaagaagctacttttcttgtgtgttattctagtgatgatggtcattataattgatgtacctgatattatgctaggtttagggatacagaaatgaaagaagatcacagtccctcatctgggacctctgtttttttggtgtcacctctctgcatagacagttctgcagtattgatgctgctgttctggttgatccttctgtcatgcctgcaccatcttttctgccagactgaagtgttcttgcttggggaaaagcagatttgcaaaggttctctttttcctgattgttgctttgcagattgagtatatttgtttgtttgtttttaagtgaacaaaagttgaatgagattgattactggctctttaaagaataattactcccccttttgacttatgtagcatcttgaggtgatctatgaccgtttgtacttgtcatgacttccattagattaaactctggggcaaagacgttgctcttcattgtgctcatatgacaccattactgccagtggaattgaaataaattgagtaagggcgagtgtttcctaacaaatgttatcctgggcctgaggaaccatcatcaagatggagtggccctgcgattaattttggacttaaagcaaaaaacaaacaaatttttttctttaaataaccagttggcacagatacagaataaaataagatagatccacgtgtagtttttgaaaatttaggtcaggtggctcactcctataatcccagcactttgggaggccaaggcgtgtggataactcgaggttaggagtttaagaccagtctggccatcatgatgaaaccccatctctactaaaagtacaaaaattagctgggcatggtggcgcatgcctgtaaacctagctactcaggaggctaaggcaggagaattgcttgaacctggtaggcggtagttgcaatgagccgagattgcgccactgcactccagcctgggtgacagagtgagactctgtctcaaaagaaaaaaaaatttaagaaataatcatcagtgtatatcttccttttttcatttttctttaaaaaaaaaaacaacccttgtatgcatagctgaaggagaaataattgaaagtgtttataagatttcaaggtgatgggctggacacagttgctcatgcctaataatctgcacgcctgtaatcccagctattcgggagcctgaggcaggagaatcacttgaacccaggaggcagaggttgcagtgggccgagatagtgccattgcactctagcctgggcgacaaaggtgaaactccatctcaaataaaaaaaaagatttcaaggtgatgggtttcatgtggaccaattttatccttccctgatgataatttgacatatgagtcagatattttcctaattttcgtaattcgagtgggattgtgtgtttgtttgtttgttttgagacagggtctcactctgttgttcaggctggagtgcagtaggccagtcatggctcactgtagccttggcttctcaggctcaagtgagcctcccacctcagcctcttaagtagctgggactataggtgcgtgctcccacacctggctaattttttctgtttttttttgtagagacaaggtctcattatattgccgaggctgggactcctgagctcaagtaatcctcctaccttggtctcctaaagtgctgggattatatccacgagccaccacacccagcctcgcatgagattttaacagagcaaagtacctgttggaaatcttgcgcacaaagcctcctttattctgttattcccactgacaggaattcagatacctggatcaattctgtttcggttttgctaaaatctctaacttgatattttacttttctaaaaacctgtattatcaatgaaatggaattaggaaaacaggacctatagaagttaagacctcttcaatctattgatgtttcatggtgccttttatattcaaaatgctttgttctcacaaaaataatactttttgtttggagaaaaaggctgtggggtgtgtgtgtgtgtgtgtgtgtgtgttttcctctcaaagatagcagtaaaataaactccttctgacaaaggcttcttaaaagaaaggagaaaaaaaaaccttcctgctaattgtgttctttaaaatcctgattccccgttttactttctggatgtgtattctgggctttttcaatgtcaaccaatactctcttgatgggaaattcagctggatttgggtatgttcattgggttttcctagaacagtttgaagatccatctcatttacctaaacaaatattccttataattattatgaaaattgggcctgttatagactaataattgacttaaaccatacagggttatgtttgtcagtatctcgtgagtcagcttttctaggggcagagattgaagagttagttctgagattgaatactatttatcagggttttgttttgtgtaccttattctcctgtaaccacctggttggcttttatcatagatacatttttgggaaacaggcaaccacatggttaatgaagatagagaagacgtgaaatttgttacctttatagattttttccccttgccctgttctcattcttctcatttgcctaaaaaaaaatataaggaggccgggtgcggtggctcacgcctgtaatcccagcactgaggcaggcagatcacctgagctcaggagttcgagaccagcctggccaacgtggcgaaactccgtctctactgaaaatacaaaaattagccgggcgtggtagtcccagctactgcaggtacctgaggcaggagaattgcttgagcctgagaggcagaggttgcaatgagccgagattgtgtgccattgcattccagcctgggtgacaaagcaagactctgtctcaaaaaaaaaaaaaaaagtataaggagtattcacatttctatgagatctgtaaatttaggttagaaaatttagttaactgtgttttgtaatagtcatataaataagcacaaagaccctccagacttcttcccagcatgtgacagtggaagaaaggggtaataaagtagatttttttgttactctcattggtaaaaataagtctgtccatgggaaggttaacactgagtttaccatcttgatgattccatatggttcctagcaattctaatctcaaagttggttggcagaatgtttaggtctttgggtagaatatcttctgtgccttttctgtgaattgtaaaattacatttgggaaataaagaaaaaaatccctgattatcccactatagcaatacaaccactgtaaacattttggtatacagttgtgttgcattatatgcattttctgatttttgtatgtccacctgtgcttatttgaactgtatccccctccccacttcccacaccctgttttctcactcctggagtgagcatgggcagtggggatgagactcgcctgtggcttcagtttgtctccttttctaagtttctctgagtgggcattcactgtgctggctgtgattctgttatttaaagcaatatattttcataccttatggcccttaaatgcaagccaacctcttcatctggtgtcaaccaaaggaaaagtgatctgttgcagcgctggaggaaaaactggcaatgttggacttacctaaattgaaagatggtatgttgttcttcaccttggggtcttcaagtatgatttttgacagtgcatggtttttatcttacatgctgacttttgtctctaacccttgagttagatgcaatttaattccagccctttttccctatatacattttacataattatccataagggtatattcatttttaaggctcttaaaatatactatatcaagtatctttccatattgctatacaatttttgtagctgtcatttataataagacattttagttttcgtcttttcagaagaattttgggagctagtataatcagctccttagaatgctttctaatttgcatactcaggtctactcacaatagttctgccatagatatttaaaatagaagcaactgttatgctgctaaattgaatatttcttaactaggcttatttcttaacaggggcatagatgtatgttttcaggcatatgggaccctttctgtaactaggcttctagagtttagaattaagattatttaaattggtctatgatcttattgaagagtgagaggctagagtgtagtggttaaaaacatcaacttgaatctggactgcttgcatttaaagctcagtattggtacttacttggttactttgatcagtttacctatcctttctttgccgccttctacatggctaaaatcaggttaataatatttacctcttaagatagtattgtgaatattaaatcagtatatacaaagtatttagaataaaatcttgaaccaacaagttttatgtaaatattacttactttcataggctagtttgctaattgctgaaaatccttatggcacaaccatgagtcttgaacacacagaataccttttttttttttaacgttttaggcagtatagttaaaccttaaatttctgttcttgtttgatagctaaagtttcagtcagaataaatttagtgttgggcttgtgaatataatattaaatctgaagtatgttgtcaacatatagtattgcagggttgatgtctagaaatgctatattagatgctcataatgttttctgtatctttttcttcccaatgtctacttgtcctttagcaaagtatgaacgttgtcatgaatcttttctctctgtccacagattctgtgtgctcctctgggccacagtagttacttctttaagcacagaaaggaaacttagggctttgccagttttagtattagttctctatgtttttcatccgggcagctatggagagggttgctttccacacacctgggtactccattgatatgttctgtagaggtaatcaacacactagagagtacacctgtttgttccatggctaaccctttctgattgtagacatgcatttgagtgtttgcagtggatatttggtgctaacaggtgtcttagttccttctgttattctgtaatgtttcccaagaatattcagagctgtttataaaatgcagagtgatttatgtattaggtgttcaatgagtttgatcaagaagattcacttgaaaggaattaactaacaaagcagtttccattgttaataggatatgcatgctgtttctctaaagtatttttatttcttcaaagagttattaagcagaggagactgattttgtggtaagtttggaggggttagttttaatccacgttggtcaaaactaaaagtagattagaaaatctatttctcatcctacagtagtgctgaggtttctagtagattgtttttcttcttcctagtcattttctgaaactcaaaacaagaatcaacctataccattgtaatgtttcacagttaacttggagtatttaacaagtctaaaatcaaagtttattgttattagtaaaacattttgaagccattcatttcatgtgacaaggaatcttatttcaccaaatgtggtatgtttttaaacttatactttctattgttctagttttgttgatctttgatattgatgcagtgatatcagtttcctattgttatatatactttgtggtcaaaattatcatagggttttgtgtttttctttgcctgagttttgcttctcatctgaacatcacatctttttcttgcggttccatttacacagtgtgattcctagagatgagcttctttatcctctgaggcagtggaggaagcatggaagccacttggggagcactgcattgacaagtgtatttttgtagtcacatggtggcagtgtcagggaaattataggactggttagattctagttcagcaacctataaatcccaggacttcccagtctcgtgagtcatacaactctcaggcctgtgctgcaaatgacacttgcttaggagtaaggtgaagggtattttatagctctaatggtttgtacagttcttaaacatgtattgattgctaacaactgctgtctttctcccagcttgccccaccaccagtctttgtgcataagcacaattttggacatagttatttgtacttatttatgcttttacaccttcttccttttataaagattttagctggtttatgacttgagttgaaacaaggaaaaaaagaggagacctgaaatggtctgtcccctgccaaccagaagcctcctgtggtatccaaacagaatagttgcctcagtctgtcagcacttctgtctttgaaggtggtttctgcttgaaaagtggtgactattagcatagcctggggataattgcttttttttcttctctcgggatacctttttttttttttttttccagatactttcttgctcttgtcgactttgtttttccagaagatttagcctgtggttaaaatgtttcgggtccccacgtgaactctctgtgggattacccaattctggggtaccttcaccagatcaccagtgctaaagagggcaaaggatcttcttggttaatagaaaaggctgttttggaatgaatctcaaagtccagaaacatcgagacttttcttcaatacttttttctatttggggtagcaactttacctagtgtaggggagggaggggttagttgggagggcttgtgtttaaggggttcagaaacaggggatttaagtgtgtcttttgtgtttgcaaggcactaacaccactcccgtctgtatttaaatgctgtccccaggttacgactatggctatgtctgcgtggagttttcactcttggaagatgccatcggatgcatggaggccaaccaggttgctttatacttcggtcaaatgatgctggaaggatatatttttttatatatggggagggagggtttcaaatgattttactttggaaaggtacaagaagtctatctgtggagcatactgtattccaaccatcggttgtgaggaaaatctttaaaaaggctggaaagctttctctacaaaacttaatgggcacagagtgcattttaaaagctagagcccagttgcttttggactagattccaaagacaatagttggaaaaaaaaaaaaaagacacatctggagtgtttccttttggagtgtgactgagatggtaatcctgatgcaaagaatgatccttgattgtctgtgaccccaaggatctgcctagcacagaaattctaggtcaatagttacacccagacctagggtgaagacctctgatggtgacttctgtggcatcagatcctgcctgcaggggctacttccaaaagagagctatcagggaagagagaggagtggattgttggtgtctattgcattcatcattgttttttgccaattggagttgcatactcaagtccttggctgcgtatagtcagagctggtgaatcagaatctgtactcaccttacgtttgaactatctggagttactcagcttgccacctagatttttcatctatgtctttaatagaaccctacctggtagttttgagaggaattaataaataggtagaatccttcttgttatggtgcttccttggggaaagttgttttctttgggttgtttcagttcctccatctgtaaagtaggaaaagaaacttaggaatatagtttgatgtgttttttttttctttttttttttttttaatgtacccactgcctatacttaacagtgtgaatacagtgggcccagaatctttctttctttctttttttttttttgagacggagttttgctcttgttgcccaggctggattgcaatggtgcgatctcggctcactgctacctccacctccctggttcaagcgattctcctgtctcagccccctgagtagctgggattacaggcatgcgccaccacgccggctaattttgtatttttagtagagatggggtttctccatgttggtcaggctgctctcgaactccagacctcaggtgatctgcctgcctcggcctcccaaagtcctgggattacaggcatgagccaccgtgcccagccaggcccagaatcttaaaagaaggctctgccagagaagagtagttattagatgagaactcttcttcttctgtagcctgatgctttgttcagctttgtttaactcagtgtggctcattatacgtacttttctcttcttggccaagttctcctcttatgggtatggagatgacatgctctaaatgctttgggagcaagcactcattagagaagacttttgatgtatccttatcttgttagtagtttaagcttgtcagatccttaaagaatgacaggcttaggaccatatcccctagacttaagaggattctcattgaccatttgttcagtgtccatcactgaatcacttaccaaatacagttgacactctgtatccacaggttccacacccatagattcaaccaaatgctgattggacatattcaggaaaaaaatgcattaacactgcaacaataaaaaataatacaggccaggagtggtggcttactctgtaatcccaacattttgggaggcccgggtgggaggattgcttgaggccaggagtttgagaccagcctgggcaacacagggagaccccatctctacaaaaaataaaagtgaaaaaattagccaagtgtggtggctatcaacttgggaggctaagatgagaggattacttgagtctggattgagactgcagtgagctgtgatcactctgctgcactctagcctggggtgacagagtgagaccccgtctcaaaaaacaaaaaagtacagttaactatttatatagtctttattaggtattagatataagtaatctagagatggtttaaagtatgttggaggatgtgtgtaggttgtatgcaaataccatgtgattttatataagggacttgagcatcctgagatttttgtgtccttgtgggtcctggaaccaatcccctgtggacaccaagggacaactgtactaaccatgtgtcagaaactgctacatgccaattttggagagaagaaaaaagcttccaatctgtgtgctttcggtggatcctattctgacagtctgtccaattttgagaacactcattaattcataagcagtgaatgtgattaagtcgttcgcctctgtgctaaatactcaatgtaatagctgatagctgagtgctataaagaaaatgaagcagggtattgggagaatgcatcatggtggcaattttagaggggtggtcagggaaacttcttgaggagtgacatacatttaagttgtgactcttggcgaataatgtatccagaacacttactatagtacctagcacttggtagcatttgaattaatttgaaattcagtgtccttctttctctctcttaccctcctccacatgtcaagtaatttccaattataaattttgtgtgtgtgtgtgagacggagtccagccaggctggagtgcagtggcgtaatcttggctcactgcaacctccgccacccgggttccagagatcctcctgtctcagcctcccaggtagctgggactacagatatgcgccaccatgcttgggtaaattttttttctttttttttttttttgagatggagtctcgctctgttgcccaggctggagtgcggtggcacgatctcagctcattgcaacctctacctcctgggttcaagtgattctcctgcctcagcctcccaaatagctgggattacaggtgcccgccaccacacctggctaatttttgtatttttagtagagatggggtttcaccatgtttgccaggctggtctggaactcctgacctcaggtgatccgactgccttggcctcccaaagtgctgggactgcaggcgtgagccaccatgtcctgccaatttttgtattattagtagagatggggtttcactatgttggccaggctggtcttgaactgcagaccttaggtgatctgcccaccttggcctcccaaagtgctgggatgacacgcacgagtcaccgtgcctggccttcaattataattataagaaaataaatttatttttatatctgaagtttaataaaactaattctttaaggaaatggatgtggattaaactccttatgacatagtaaacaatcttatgagagacataagaatgtgagggaagaagtcctgtctcctcagggtgaataaagtaaatattttgggaggctgaggcgagcggatcatgaggtcaggagagcaagaccatcctgaccaacaaggtgaaaccccgtctctactaaaatacaaaaaaattagccaggtgtggtggcgcacgcctgtagtcccagctacttgggaggctggggcaggataattgcttgaacccaggaggtggaggttgcagtgagccaagattgcaccactgcactccagcctgctgacagagcaagactctgtctcaagaaaacaataaaattgaataaataaataaataaataaaataaatatttgtggaagataaaatgtgtttgtaggccgggcactatggctcaagcttataatcccaccactttgggagaccaaggctggaggatcacttgagcccaggagtttgaaatgagcatggggtaaatagtgagaccctgtctaaatttaaaaaaaaaaaaaaaaaaaaaaaagtctttgtctatcctttcccccagttttacttacagaccaaattggtatggattctgagtcaccacgatctgcttggcaactcttagtagagcctgagtgtgtgtgtgcctctgagaaggttactccgaagtactttgagtttttttgtaactctttgctattccgactcttgatgtgaaatgtcttttatttatcattggctggtacttgtaggcctaggggatggaaataaaggaattttctgctagcttgctttgtcaaatattgttgggtatgtgtgccttcgtgaagttgctcaagatgataaccaaggtccctctagccttttcctggtgcctagatcaagctgttaaacagtaggatgctctgcagcagtactgagctttgtggctgtggtgaccgatcagggtatcacttaggcagcagctgtctatctggagaaataatttccaacaggtatgaaggtatgaatctgttagtctgtaccatcaccatttctgtctaggagaagggggcagccagcaagcactgtcaggcagagcctttcgttccacccttcctgcaaagtgtatttctagccctgtcatatgcccttggctttctttgttgtcaagtctctgggagattgagggtacatattatttccttctgctttgtgtgcccttgcactgggacttggggaggggagtaagaagtattgtgttaaaatgttaatccctttcattggttgcccagttgtgagtactagccctctcagactgttggcatttggtatgcagggattagcattttatgttctcaagtatgctggtgtgatgcttattgtctattatttggccaaattagtcactaaagtgcccttatagaagataactctgggagaggtatttatttctctgaaatttttattctcctttcccctttcctttcctttcctttttctttttctttttttctttcctttttctcccctcccccccctcccctctcctcttattggagacaaggtctccctctgtcacctacgctggagtgtagtggtacaatcatggctcactgcggcctcgatctcttgtgccgaagtgatcctcccaactcagttctctttagtagctggaactaccaccaccacagctggctatttttttttttttttttttgtagaggcagggttttgcaacattccccaggctggtcttgaactcctggactcaagcaatttacctatctcggcctcccaaagcactgggattccaggtgtgagccactatgcctggcctatttttaaatttttatttttttgagacttagggttctgttctgttgctcaggctggagtacagtggtacgatgagagctcattgcagctttgaactcctgggcttaagcaatcctctcacctcagccttctgagtagctggactacaggcacctgccaccatgttcggctaattaaaaaaataacaaactctgttcgtaaagatggggtcttgctgtgttgctcaggctgctcttgaactccttgcctcaagtgagcctcccacctggacctgccaaattgctgggattataagcatgagccactgcgcccagccttactcacctttttgtatgacactatcagtctttctaaagtgcaaagaaaaagggttctgttatcatctgatgtgaaaattcctttaaacattgactttttctggtgtgaggaatgaaagctgtggaatacgtgaagttttatgaaatagtgtttttttgtgtgtgtgtcaacaaaattaagagagtttgggttattgaagatacaagagtgtttttgaaggtatatataggaaaccaaatctcaaatgtggtctgtccttgtgattaaaattagagcaatagggaagccaggtgtgatggctcacacctgtaattccagcacttttgcaggctgtgacaggaggatcacttgagcccaggagttgagtccagcctgggtaacatagcaagacctcatctctacaaaacattgttaaaaattagctgggtgtagtggcacatgcctattgtcccagctatttggaaggctaaagtgggaggattgcttgagcctgggaggtcaaagctacagtgagccgtgattgtgccactgcactgcaacctgggcgacagagagatcctgcctcaaaaaaaaaaaaaaaagcaacagagaaagcttatgtttttagtgatgagaatgctatttgtgaggccatgatggaaaaaattgaagaacctagtttgttggaaacttaaattggtagtaaagacataatactatctgaaacactttagtacttaaattgtgtgcattccaagcaacaaaaccaataatctgtaggttgaaggttgtagtgttacctaaacaactatcaccccaaaaacacttcattgaggagtatccagcatcctagccagagctcaactgtataacttatggctggaatcatgccattcttgctggaaacttcaatttcagtactttttccttatcaccctcagaagggtagtagtagaaacatggggaactgcattctaaaatgagtgtataggttcataacctagctagaaaaaaaaattaaaacaattaatgagtacaaaccaagggttattgaagagtctcgctctcaagagagttggggtattcaagaaaattgaaagtgagtttaaggatcgatgacttgattacacattttggctatttatccactgattgagacttttttttttgagatggagtctcactggttcgcccaggctgtagcgcaggggtgcgatttatccactgattgagacttttttttttttttttttcagatggagtctcgctgtgtcgcccaggctgtagcacagaggtgctcactgcaacctccgcctcctgggttcaagtgattctcctgccttagcctcccgagtaactgggattacaagcatgtgccaccacgcctggctaatttttgtattttcagtagaaatggggtttcaccatgttggccaggctggtcttgaactcctcacctcaggtgatccgcccgcctcggcctcccagagtgctgggattacacatgtgagccactgtgcccagcccagtgattgagactcgactggacatgaagcagtataatgtagcagtataacatagtattctggaagcagactaccgggggttgcatttcggctccatcactttctaaggtgtacttgaacaagtggcttaacctctctgtgttttaacgtactctcacacacatctagggattaaataagttaatgcatgtaaggtgattagaactggggctggtggccgggtgcggtggctcatgcctgtaatcctagcaagttgggaggccaagacgggcggatcacgaggtcaggagatggagaccatcctggctaacatggtgaaaccccgtctctactaaaaatacaaaaaaattagctgggcgtggtggcgggcgcctgtagtcccagctacttgggaggctgaggcaggagaatggcgtgaactgggaggcggagcttgcagtgagccgagatcgcaccactgcactccagcctgggcgacagagtgagactccatctcaaaaaaaaaaaaaaagaactggggctggcacaaagtgaatgttgagtgcatctttgttgttttcacacaacttctcatctgaaacaaagtcttaagttacagcagctctggtcttggcttaatggagtatatggcaaaaagaggatttggtggcagtgcctaggaggatttttttttttcccatcaacaatacttctcatttagcctgttgattgatacggattatcaggggactccttccagcttccctagttggagtttttttttttttttttccttttttgagacagggtctcattctgtctcctaggctggagtgcagtggtgcgatctcggctcactgcaacctccgtttttggggctcaagccactctcatgcctcagcctcccaagtagctgtggctacagacacgtgcctggctaattttgtatttttgtagagacggggttttgccatattgcccaggctgatctcgaactcctgaggtcaaagcgatctgcctacctcagcctcccaaagtgctggattacaggagtgagctaccatgtccggcccttagtaggagtttctgctgccttagccttcaagagagaatcttaaattttcttttttttttttgagacagagtctggctctgtcgcccaggttggagtgcggtggcgtgatctcggctcactgcatgctccgcctcccgggttcacaccattctctcgcctcagcctcctgagtagctgggactacaggcgcctgccaccacacccggctaatttttttgtatttttagtagagacggggtttcaccatgttagccaggatggtctcgatctcctgacctcgtgatccacccgcctcggcctcccaaagtgctgggattacaggcgtgagccacctctcccggccataagaatcttaaattttctaaagagaaagagcaggagacagacagtaccacatggagtatgtttaggccatgtaggaaatctagcctgtggctttaaaaccgtaagttctaaattagctgggtatggtggtgcacacctgtagtcctagctactctggaggctgaggtaggaggatcacttgtgcccaggagttcaaggttgcagtgagctgtgatggtgtcaccgcactccagcctgggcaacagaatgagatgctgtctctcaaagcaaaacaccctaagctctgataaccagcccattatttgccacatctcaggctctttaattatgagaggtgctctaaacgactcattttaattctctcgaatttgaaaaataaacatttatcatttggcagttttaagggaaccttctgatatgtgtcctacaatgggtttataattatttttgtcacaaatcatggtttatttctatggattaaagtagtttagttcttaatttgttctaaattggaaatatacctatatgttttaacctcgtgcttcagtgttgtcacatctcattagttcaggggtcgtacaaaggcatagttcagttagccatcttgattataactttggtttatgaccttatgtatgttcagatggtatagggttcgtagcacagaaagatttagaattccagcttcattacctcctggctcttttgtaacttttttttttttttttttttttttttgagacggatcttgctctgttgtccaagctggagtgcagtggtgtgatctgggctcaatgcaacctccacctcccgggttaaagcgattctcctgccttggcctcccgagtagctgggattacgggcatacaccaccacgcccagctaatgtttattttagtagagatggggtttcaccatgttggccaggctggacttgaactcctgacctcaggtgatccacccaccttggcctttcaaagtgttgggattataggcgtgagccaccgtgcctggcctctcttttgtaacttctgaacctcagttttctcatctgtaaaatgagaggatgatcataataccacccatagtgcagttgtgaggttagagtatgtagtatatgtaaagtgatcagcatgataactggcatgtggtaagtgctctgtagtaaagggtgattcataacactggactctgcttggttgtaccaacttctcattttccctggctccttatccacctcttgggattcagagttggctgaaagtggcaggcagtgctgctttgggtggcagcttgattttagacagccagttcacatagtgcttttgttcaggacctctcgggatttctagacagacagcaagagagttgggctaacacctgtcatgaagtgtctaaggaatgagtgcacaagcattcaggcatgtgagggcagaagaccatgaccatacctgccttcctacagtaaacagcctgttgtttctgcaggtagcattgcaggtagttcttttatcagaaaattcttgtaggctgcaggtgacattgagtgttattaggtatcttcttcattcaagttgaacttggaggttacagtatatctttatgtccccctctccacaggtgtttaagtgttgtcattcatcctctagtgcatagattatgtgtgcacatttcttgttaaggatattgatgaactgatagtttatctagaataatgtttattttatattttattttattgagacagggtcttgctctatcacccaagctggagtgcagcggcatgatcatggctcactgcagcctcaacctcctgggttcaagccatcctccctacctcagccttctgaatagttgggactacaggtgtgcgccaccacacctggctaattttgagggggtagaggggaggtacagatgagatctcactgtgttgtccaggctggccttttgctcctggactcaagcagtcctgcctcagactcacaaagttctggaattacagatgtgagccactgtacccagcctagaataattattatttatttttatttttatttatttattttttgagacagagttttgctcttgttacccaggctggagtgcgatggcacagtcttggctcactgcaacctctgcctcccgggttccagtgattctcctgcctcagcctcccatgtagctggaattacaggcacaccaccacacctggctaatttttgtatttttagtagagacagggtttcaccatgttggccaggctgctctcgaactcctgacctcaggcaatccacccgtctcggcctcccaaagtgctgggattacaggcgtgagtgatggcacccagccagaataattagttttaatctcacagggtgagatttgtgaggttaattttgtatattaatgatgtatatattaccaaaatctgtggtcaagtgaaatttgtgcttaatctttgcaaatgctatttccaaaggaaaatatgtaggagaaaaggtggtgtatcacaggatgtagagtagtggttactgggcacaagggtggccggggagtcggggggtggcaggagaggatagagaatgataactgattgatacagggtctcttttttgggatgaggaaaatattttagaattaaatagtgaggatggttgaccaagcttgtgcatgtactaaaagccattaaattgtatatactttaaaacagtggattttatggtatgtgaattttatctcaattttaaaaaaagtctttaaatgtagtatgaaactttttttaaggccaggcagggtggctcacacctgtaatcccagcactttgggaggctgaggcgggcagatcacctgaggtcaggagttctagactagcctggccaacatgatgaaaccctgtctctaccaaaaatacgaaaattagcccagcatggtggtgtgttcctgtagtcccagctactcgggaggctgaggcaggagaattgcttgaactcaggaggcagaggttgcagtgagctgagattgtaccactgcactccagcctgggcgacagagcaagactgtctcaaaaaaaaaaaaaaaaaaaaaaaagtttttttagggttccagcacaatgggaatgagtccagatctaaaataaagtacagattcatttaccaccctccaccctaccccaaccccccaaaaagattgtctatcagtttgtcaggaagttagagtaaaatggtcttaaaatgcatcaagagggctgggcacagtggctgatgcctgtagtttcagctactcaggaggctgagataggaggatcacttgagcccaggaattcgagtgagccatgattagatcactgcactctagcctgaatgacagagcaataccttgtctcttaaaaaaaaaaaggcatgaagaatttttttgctaatggtatctacttaccacagaggaacatttaagctaaacatctgaaagattatggatggagttggtaacaggctccatttgaactggttatgtagtttatgctcagtaaggttgaacggactttctgctttgagttattcacagttaaaaataaaggactattttgaagtagaccgaaaatgaaaataacattaagaaatccttggactaatttttaggggagattcctgtaatcggatggtttgtagttgtcaatgtagacctttcctggtttcctgaaattgctaatcaaagctcaaagccatgggaaaagactggattgcagctagaatgtgtgctctccacatatgtctttcttagaggcctctttcaagcagcattgacactatggctatcatctttgaccctcttagtatacagagagttgtaggttttctttttttaagggggaaaacattattgacataaattatatatcataaaagtcactcattttaactgtacaattcaatgattttttagtaaatttaccaagttgtaacatttattattataattagttttacaacatttttcttttctttctttttttttttttctttttctttttttctgggacacaggatcttgctctgttgcccaagctgagtgcagtggcatgaccatggctcactgcagcctccacctcccgggctcaagcaattctcccacctcaacctcctgagtagctggaactataagttggaaccatcgtgcccagctaattttttattttttgtagagagaaggtcttgctatattgtccaggttggtcttgaacttctaaactcaagcaatccttcctgcctcaccttcccaaagtgctgggattacaggtgtgaaccatcatgcctggtctagaacattttcattacctcaatcggatccccgtttggggatacatttacatttttaattttttaatttttattttttttagagacgaggtctcaatctattgccaaggtggtcttgaactcctggtttcaagtgatcctcccaccttggtttcccgaagtgctgggattacaggcatgaaccaccatgcccagtccattccaattttttttttctttttttttgagatagagcctcactctgtcgcccaggctggagtgcagtggcgtgatctcagctcactgcaacctccacctcccgggttcacgccattctcctgcctcagcctcccgagtagctgggactacaggtgcctgccaccacgcccggctaagtttttgtatttgtagtagagacggggtttcaccgtgttagccaggatggtctcaatctcctgaccctgtgatccgcccgtctcagcctcccaaagtgctgagattacaggcgtgagccaccgtgcctggcccattccaattttttacaaaagtgatttcagacttataaaaaagctgcaaaaattcctgtgttcttttcacctagattctacctttttttttttttttttttttgaggcggagttttgctcttgtttcccaggctggagtgcaatggcgcaatctcggctcaccacaacctccccgtcccgggttcaagcaattctcctgcctcagcctcccaagtaattgggattacagccatgcgccaccacgcctggctaattttatattttttagtggagaccaggttcctccatgttggtcaggctggtattgaactcccgacctcaggtgatctgaccacctgggcctcctaaagtgctgggattacaggcgtgagccaccgtgccaggcccacccagattcttcttagcacatttgaatgcagatttttgaatagttatgatctattctcattgaaaaagggacatcatttgacttgacctcccaccagactcttcctttgaggttggatggaggtgcttaatggatgctgtggatggtgtgtgaatttccattgggttgagtggatgatgtatgtggaaggcgattgggatttactttgtcggtgtctccaagaggtcccccactgggctttgtcaggtgctggggttggaggtcaagaagtagggcaacatctaaagcttctactcctgggcactgtgaggtttttataggtcttttaaaaaaaacagtgaataggccgaacgcggtggctcacacctgtaatcccagcactttcagaggccgagggaggcggatcacgaggtcaagagatcaagaccatcctggcctcgtggtgaaaccccatctctactaaaaatacaaaaattagctgggcatggtggcacatgtctgtagtcccagctactcgggaggctggagcaggataatcgcttgaaccctggaggtggaggttgcagtgagcccagatttcaccactgcactccagcctggcgacagcgaggctctgtctcaaaaatatgttcttccatgagacagcgggcatttggatgcctgatacaaaaagaggagggactatgtgctagtcagctttagactgagaagcagcagcaaccatggcaaaggggaagcaaactttcctgagtggccttaataatgttattcgtcaggcagtggctcttaaacaggggcttcaagcagtgatttttgacatgctcttctcctccccaaccactggacatttggcaatgtctggagacatttttggttgtcaccactgggagagggtgctactggtatctagtgaatagagccagggatgctgctaaacatcctacagtgcaaagggcagctctccacacaaagaatcatctggcccaaaaatctctattgctgaggttgaaaaatactggtgtaaggagacaagagttgtggttagtcagaaaggatgacctggcttgccgtggattgtcttataataatcagttatctctttccttgccttattcctggtcccaacagagtgaggattggcaagggggtttgggaatatagtgggaatgctgtgtagtgagagtgcaggcacggcactccagactaccagtcacgagcttagcctgtgtccttggggtaggagctgtagaataagacctattttgatatgtggaccagaataagttctttaaataatcaaaggtaataaacattcttaaaatatactatcactaaggtagtctgtcatccagcagaatgagggagtagtcagaagattacacatatttggcagcaattactagaaaaaacaaacaagttgagagttttcaaaatagatgttacttcatatttcagatagttttccagggaatattgaaaatgcaagtgcagattttcacatccttctttatactgattaaaacatttgaatctattggatcatcttttcattaggctttacttcacagggccatctactggatcctgtatgctgatatagttaaggggactgacctcaaagtaaaagatgcatatattttatcttaatacaatatcactttgctgtgaaggggagctgctgtgtatatagaatgctgtgtaatagtgattgggctgttgggaatcacattggaaatatcagtaagcaactcattttaacttttgttaacacagttaagtgctgagcacctcttgtgtttgaagctctgtgctaggtaatatgtgttcattaatgaatgaaaaaacaatacaaaaattagccaggcatggtggcgtacacctgcagtcccagctactcaggaggctgaggcacaagaattgcttgaacccagaaggtggaggttgcggtgagccgagatcacgccactgtactccagcctggccaacagagtgagactgtctcaaaaaaaaaaaaaaaaaaaaaaaaagttttttatttttaaattttttgttttatttcttttttacttttttttcttttgagacagagtcacgctctgtcacccaagctggagtgcagtagcaccatcttggctcactgcaaccccccgcctgccaggttcaagtggttgtcctgcttcagcctcccaagtagctgggactacaggtacccaccaccacgcccggctaatttttgtatttttagcagaggcggggtttcaccatattggccaggctggtctcaaactcctgaccttatggtctgcccgcctcagcctcccaaagtgctgggattacaagcatgagccactgtgcctggcaaaatttttattttattattattattatttttttttttttttttgagatggagcctcgctctgttgcccaggctggagtgcagtggcgcgatctcggatcactgcaagctccgcctcctgggttcatgccattctcctgcctcagcctcctgagtagctgggactacaggcgcgtgccaccacgcccggctaattttttgaatttttttagtagaggcggggtttcaccatgttagccaggatggtctccatctcctgacctcgtgatccacctgcctcagcctcccaaagtgctgggattacaggcgtgagccaccgctcccggccaatttttattttatttttaattgataattgtacatgtttatggagtacccatgttatgatacatgtgcacattgtagaataatttttaattgataattgtatacgtttatggagtacccacgttatgatacatgtgtacattgtagaatgattgaatcagactagttaacatatccatcacctcatgtagttatttctttgtagtgagaacatttaaaatctcttttagcaattttgaaatagatacaatacattgttattaactatagtcaccatgctgtgcaatagataactaaaacttcttcctcctgtctgactgaaactttatactctttgactaacattctcccgttctcctccacccgccttctccacccacggcctctggtaaaccaccattctgctctctacttctgtctgaatatttgatttttttagattgcacatgtgagatcatgcagtatttgtctttctgtacctagtttataatacacttagctaagtgtccttcatgtttttccacatgtcgcaaatggcagaatttccttcttttttaaggccaaatagtatttcattgtgcttacataccacattttcattatccattcattcattgatgggcaatggatgaatggatatcatggctattgtgaatagtactgcagtgaacatgggaatgcaggtatctctcagacataatgatttcagtttcattggatatatactgtacccaaaagtgggactgctagatcatatggtgattctcgttttagtttttttttttttaagaacctccatacagtttccaaaatatctgtactaatttacattcccacagtgtaaagggttcccttttctccatatcctcactaacacttgttaccgttcatcttttttatagtaaccatgctaacaagtatgaggtgacatctcattatggttttgtttgtttgtttgagacagtgtcttgctgcatcacacaggctggagttcagtggcgtgatcccagctcatttgcagccttaacttcctgcactcaagcagtcctcccacctcagcctcccaggtagctggtgtgtcaccatgcctagcgtttttttttttttttttttgagacagagtctcgctgtgttgcccaggctggagtgcagtggtatgacctcggcttactgcaatctctgcctcccgggttcaagtaattctcatgcctcagcctcctgagtagttgagattacaggcatgtgccaccacacccagttaacttttgtatttttagtagagatgaggtttcattatgttgtccgggctggtcttgaactcctaggctcaagtgatcctcccaccttggtttctgaaagtgctgggattaccagcatgaaccactatgcccagctccttatggttttaatttgtaattctctgataattattgatgttgaacattttgtcatatattttttggcaattttttttcttcttttaaaaattttgtttttagccataaggccaggaatgcacgtatgtcttctttcaagaaatgtctgggctgggcacagtggctcacgcctgtaatcccaacactttgggaggccgaggcgggtggatcacgaggtcaggagatcgagaccatcctggctaacatggtgaaaccccgtttctactaaaaatacaaaaaaattagctgggtgtggtggtgggcgcctgaagtcccagctatgtgggaggctgaggcaggagaatggcgtgaacccaggaggtggagcgtgcagtgagccaagatcgcgccactgcactccagcctgggcgacagagcaagactctgtctcaaaaaaaaaaaaaagaaaaagaaaaaaaaatgtctattcaggtcctttgcccattttttaatagggttatttgttttcattattgagtagtttgagttctttgtacattttggatattagccctttatcagatggaagatttgtaagtattttctctcaatctgtgcattgtttcttcactttgttaattgtttccttgctttgcagaagctttttagtttgacgcaattccatttgtctgtttttgcttttgttgcctggcctttgggggtcatgcacaagaaatcattgcctagaccagtgttgtggagctttccaactatagtttcttctagtagttttacaatttctgttcttacatgaagctatgaacagttcctgtatagttatccctgccacccttctcccaacattacatacacagcctccccaactatcagcatcctgcagtgtagtgtatatgttacaatcagtgaagcaacattgatacatcattatcaagggttcactctgggtgttgtaccttctatgggtttccacaaatgtatgtcatatatccaccattatagtatcatacagaatagtttcattgccctagaaaccctcttttctccacctgtttgttctttcctcttgcaaacccctgcaaccactgaactttttattgtccgtgtagttttgccttttgcagaattttatatagttggaattggacaatatgtagccttttcagattggcttctttcatttagtagtacatttctctatgtagtctcattcctctatgtctttttgtggtttgatagctcatttctttttagcactgaataatatcccattgtatggatatatcacagtttattcattcacctactaaatgacattttggttgcttccatgttttgacagttacgaataaagctgcaataaatatccatatgcatgtttttgtacggacatacgttttcaactagtttgggtaaatacaaggggcatgattactggatcgtatggtaggagtgtgttttttttttttttttttttttttttttttgacacggagccttgctctgtcaccagctggagtgcagtggtgcgatctcggttcattgcaacctctgcctcccaggttcaagtgattcttctgcctcagcctcccaagtagctgggactacaggtgcatgaccatgcccagctaattttttgtatttttagtagagacagggtttcaacatgttggccaggatggtcttgatcttgtgacctcgtgattcgtccacctcggcctcccaaagtgttgggattacaggcgtaagccactgcacccagcctgtagagtatgtttaattttgtaagaaactgtcaaacagtttttccaaagtagcgattacaatttgcattgctaccagcaatgaattagagttctgttgctctgtatccttgccagcatttggatggtagccatttttatttttatttatttattttttttttttgagacaaggtcttgctctttcacccaggctggagtacagttggacgatctcagctcactgcagcctccgcctcccaggttcaagttattctcctgcctcagcgttctgcatagctgggattacaggcacgcaccaccacacccagctaatttttgtatttttagtttcaccatgttggctaagatggtcttgaactcctgaccttaggtgatctgccccgccttggcctcctgaattgctgggattacaggcatgagccaccatgcctggcctcctttgggtatttctattggacagtcatgtcattcatgaataaagacaattttatttcttcctttctaatccatataccttttatgtccttttcttggcttattgcactagctaggatttctagtacaatgctgaaaggagctgtctttctcttcttttctctcctttccttgccttttccttttcttctttttctttcttttcttcctatagagatagggtctcgctatgttgccaaaactggtctccagctcttgggcccaggtgatcctcccacctcagcctcccaaagtgctgggattacaggtgtgagccaccacacctagctgaaaaggagctgttgagaatacatccttgtcttgttcctgatgttagtgggaagaaagcatctagtctctcaccataagtgtgatgttagctataggtttatcaagttgaggaggttcccctctgttcctagtttgctgagaggtttttttttttaaatcatgaaaggggattggatttttgtcaaatgatttttctgcatctattggtatgttcatgttaatttcttcttcagcatgtcgatgtgatggattacattaattgatttttttttttttttttagatgcagggtctcactctgttgcccaggctagagtgcagtggcacaatcacagctcactataacctcaagttcctcagctcaagcaactttcccatctcagctttccaagtagctaggactacaggcacataccaccatacccatctagttttttaaaacattatttgtaaagatgaagtctctctattttgtccaggctggtctggaactcctgggcgggctcaagcagtcttcaccttggcctcccaatttgtttggattacaggtgtgagccactatgcccagcctcatttttgttattagtaatttgtatcttctttctttttttcttagactggttaaatgtttatcaattttattgatcttttcaaagaaccaacttttggtttcactgatttatctctattgatttactgttttcaatttcattgacttcagctctaatttttattattttcttctgcttacttttgatttaatttgctcttttactggtttcctaaagtggaagctcagattattgatttttagatttttcttctcttttaatatatgcattcagtgctataaatttccctctcagcactgctttttgtgtatcgcacaaattttgataagttgtgtttttcattatcgtttacagttgtgtgttaatccccatacagttaatgatggggataaattctgagaaatgcactcttaggcaattttgtctttgtgcaaataccatggagtgtacatacacaaacctaaatggtatagcctgctacccacctaggctatatcatttagcctattgctccttaactgcaaacctgtacaacttgttaccatattgtatatgataggcagttgtgacacagtagtatctaaagatagaaacggtacagtgaaaatacagtatttcagtattttgggaccaccatcatatatgcaagcccattgttgactgagatgtcattatacagcatctgaccataattcggaatatttttaaattcctcttgagatttcttctttagcttgtgtgttatttagaagtatgtttttaaatctccatatactttgggatttttacaactatattactgttactgacttctagtttaattctattgtgatctgagagcatatattattttttctgtcattttaaactggaaaaggtatgttttatggcccataatgtgctgcgtgagcttgaagagaatatgtagttcgctgttgctggatgaaatagtctacaaatgttgattagattgctgctgttattttgatgcgtatccttccagatttttctatgcatgtatcatctatctgtgtatctatctgtaggataggagagtcttgtacaaatggttttataactctttaacttcaaatattgtggacttacttccttgtcattaaatacatttaaggctgggtgcagtggctcatacctgtaatcctagcactttgggaggccgaaacaggcagatcacctgaggtcaggagtttgagaccagcctagccaacatgttgaaaccccgtctctactaaaaatacaaaaattagctgggtgtggtggcacacgcctgtaatcccagctgctcaagaggctgaggcacgaaaatcggttgaacccaaggaggcggaggttgcggtgaaccaagattgcgccagtgcactccagcctgggtgacagagcaaaactttgtctctaaataaataaataaacaaataaaatacatacctatgtacatacatacattttaagaatcattttgatatattcatctccatactgaggaatttaagtgcttttttttttttttttttttttttttttttgagacagagtctcactttgttgcccaggctggagtgtggcggcacgatcttggctcactgcaacctctctacctcctgggttcaggaaattctcctgcctagccgggtgagatttcctctttagcttgtgtgttatttagaagcatgtttttgtacctatcgtagcttctctagagaagggaggtaggagaatcgcttgagcccgggaggtcaaggctgcagtgactgacccatgaccatgccactgcactgtagcctgggtgacagagtgagcccctgtctcaaaaaggaaaaaaaagaaatcagcatattttatgacttaataaatgtattcaaattccatccagatatttcctaatttattattttactaacagtgtttgagagcacttgtctcccctgccttccaaccagtgtcaagtgtattttaacaaaatacttgtattgggtagtagtacatggttggttgttactctctaatcgcctgttgtgtttgaaatatttaataatttttttaatgttgctagtgtagtgaagaagataatgatttagtttttcttctttcttttttttttttgagatggagtttcacccttgttgcccaggctagagtgcaatggtgcgatctcagctcaccaaaacctctgcctcccgggttcaagtgattctcctgcctcagcttcccgagtagctgggattataggctcatgtcaccacgcctggctaattttgtatttttagtagagacagggtttctccatgttggtcaggctggtcgcgaactcccgatcttaggtgatctgcctactttggcctcccaaagtgctgggattacaggcgtgagccaccgcacctgacaaatgatgtagtttttctcccttaggttattagtaggcagaatagttttacatttgattattagttattcatatttcttttgtgacttgttggttcttaatatatctattcagccaaaaatgaaaaataggatatcttagcctgtctagtcttaaggtaaatatatgtgggatataagggagtttgggggctgggcgcagtgactcacacctgtaatcccagcacgttgggaagctgaggtgggctgatcacttgagcccaggagttcaagaccagcctgggcaatgtagcaaaaccccatctctaccaaaagtacaaaaattagccaggtacagtggcacatacctgtattcccagctactagggaggctgagatggaaggatagcttgagcccaagaggttgaggctgcagtgagctataagcatgccccactacattccagcctgggtgacagagcgagaccctgtctcaaaaaaaagatttttttgaaaagttgaaaatgagtatattcgctgaatacgagatgagttttcccaagaatttatccctcagaatctttcacgttcttcctcctccttctcctcctcctgctttcttcttcttctttcttctttttctgtttcttcttcttgcttttataaagtcttagctcctgtggagttttctctcagttacttcttatttatttatttgagacagagtttcactcttgttgcccaggctggagtacagtggcgcgatctcggctgactgcaacctccgcctcctgggttcaagctattctcctgtttcagcatcccaagtagctgggattacaggtgcctgccaccacacctgactaatttctgttacttcttttgagccacaaagtatttgaaaaagatgcattaagtagtgaccgcagtccgtgctagtattgggtgcttacagaggtctagtagaataccgtgttttaaaaggaggtgaatttaataattgctgtgattactctggcattatacgctcacaaataaaatgtttggtgattttttttttttttttttttggagacagattcttgctctgtcacccaggctgtgcaatgatgtgatctcagcttactgcaacctccgagttcaagtgattctcgtgcctcagcctctcgagtagctgggattacaggcacccgccatcatgcctggctaatttttgtatttttgtagagatggggtttcaccatgttggccaggctggtcttgaactcctgacttcaggtgatccacccatctcagcctcccaaagtgctgggattacaggtgtgagccactgctcccagccgggtgtgatatttttaataaaacaagtattcaaattcacttacaggaccaatgaaagaatcgtttgtcgtaattttatgccaaagggtacttgtggcttaagataaacttcccataatgacattatccacagattcaaaaagtagtttatcttaaacaacttctgtgacattttaaaatgatgtggcttagaaaattgctaggttatctaaaatggctctattgatgatgtaaatgtagcacatgaagagcttgaataaaatagacttttgaagtgtgcaaatggaaagaacagtccttctaaataattatttcccctcccttttattgacgtatacatacagaaaagatatcatgtcgtaagtgtattgcttagtgaattactccaaagttggatatacctggttaaccaccacctgaatgaaaaaaacagaacactgcttcatatggagaagcccctcctgcccctcctggtcattgtccttttcatccctcccacaggtagtcactgagttctaataccacagagtcttttgactttcttttgagccttatgtaattagaatcacaaaagatgtattcttttgcctgacttttatacttagtattgtttttgaaattcatcttgtgtgtaactgcgatttgttcattttcattgcttagtgaattattccaaagttggatatacctggttaaccaccacccgaatgaaaaaaacagtttttggccgggcacgatggctcacgcctgttatcccagcactttgggaggctgaagcgtgcagattacgaggtcaggagatcaagaccatcctggctaacacggtgaaaccccgtctctactaaaaatacaaaaaattagctgggcgtggtgacgggcccctgtagtcccagctactcaggaggctgaggcaggacacctgtaatcccagctacttgagatgctgaaacaggagagtggcgtgaacttgggagatggagcttgcagtgagccgagattgcgccactgcactccagcctgggcgacagagcaagactccgtctcaaaaaacaaaaaacaaaaaacaagaaaacagttttccagtctaagaatgtattacaatttattcaaattccactctagatggactgtgggtttttttttttcccccatttggagctatggcaaatgatgttttttcaaagttgttatttctcagccaggcgcggtggctcacgcctgtaatcccagtactttgggagactgaggtgggcagatcacctgaggtcagaagcaagaccagcctggctaacatggcgaaaccccgtcttttctaaaaatacaaaaattagccaggtgtggtgatgggcacctgtaatcccagctacacaggaggctgaggcaggataatcacttgaacccaggaggtagaggttgcagtgagctgagatcacaccactgcactccagcctgggtgacagagcgagactctatctcaaaaaagaaaacaaaacaccacggaattgttatttctcttggcgaataggtagatgcacttattcctgttaatatatacctacctgtgaatgtgcttgttggattttctatgtatcttctgtctgccacctagaaatttaaccttttatatatatacaactttaatttttttttttttttttttaagagacagggtgtcactatgttgcccaggctggttgggaactcctggccttaagccgtcctcctgcttcagtctcccaaagtgttgggaatataggcgtgagccactgtgccccactgttcaagttttcattgattgctgcctacatatagttgttcaacagctattgattccccctgctctgtatatatgtctcctagtgtaggtatcagggttacagcagtaattaagaccacattatttcattttatcatttaaatatataagactaattgataaattaagtatagaactttgaccaacatggtgaaaccccatctctactagaaatacaaaaattagctgggtgtggtggcagacgcctgtaatcccagctactcaggaggccgaggcagaactgcttggagatggaggttgcagtgaaccaatatcagaccactatactccagcttggatgacagagggagactttgtctctttttttttttctttttttttgagacggaatctcgccgtcttccaggctggagtgcagtggcacgatctcggctcactgcagcctccgcctcccgggttcaagcgattcttctacctcagccttccgagtagctgggattacaggcacccaccaccatgcccggctaatttttgtatttttagtagacagggtttcaccatgttggccaggctggtctcaaacccctgacctcaagggatcaacctgctttggtctcccaaagtgctaggattataggcgtgagccactgtgcccggcccttttttttttttttggagacagaatttcgcccagttgccagactggagtgcagtggcacgatctcagctcactgcaacctctgcttcatgggttcaagccattttcctgcctcagcctcccaaatagctgggactacaggcatgcaccaccacgtctggctaattttttgtatttttagtaaagccagagtcccaaagtgctgggactaggcaggcgtgaaccaccacgcctggccaagactctgtctctcaaaaaaaaaaaaaagaaaaaaaaatataggactttgggaggccgaggcaggcagatcacctgaggtcaaaagtttgagaccagcctgactaacatggtgaatccccatatctaccaaaaaatacaaaaattaggcaggtgtggtggcgtgcacctgtagtcccagctattggggaagccgaggtgggagattgtacctgggaggcagtgagcagagatcgcaccactgcactccagcctgggtgacagagtgagaccttgtctcaccaaaaaaaaaaaaaaaaaaaaaatagcataggtaggcatttgatgatttgatgatttcattcgcatccctaaaagtttatttgttcctgggtcgtcagatagctttttggccatcttcctgttgagaaaattgatgtacccttctggagtcctccaattttccattataatatggtaagtgggagctagagctttgggtaagaattgggatgtgataaggaggatgagttttgcagtggtgtgcatggttaggaggagaaaaagctggaggcagagtgttcacttagaggcttggggtaggaggggtaggtttaagtggtgctcatctgggccagaatagggcaaaaagggaagaatgaaataaccagatgtctttgctttgtcagtagtcttgcagccctgaaagctttttttgttgtgttatatttgttgtaattgaggtataatccacataacataaaacttacctctttcaagtgtacaatttagtagtttttagtatattcataaaattgtgcaactatcaccactgataccagaacatttctgggaacaaaaagaaactatatatccattaagagtcactctccattttctcctacttccttctctacccccagtcatctgctagtcggctttctgtctctatagatttgcctgctctggatatttcatataaatggaatcatataccatatggtcttttgtgactggcttcttttacttagcctaatgtttttaaggttcatccatgttatatgaatcagtacttaaatcatttatagggttgaataatattccatcatatggatataccacattgtctttatctgctcattaattggtagacatttaggttgtttccacttttgtttattatgaataatactattcacattcatgtacaaggttttgtgtggacacattttcagttctcttcgatatataccaaagagccacaatgctaaaacttccagctttttaccagctatccccagatgcgtagcctagtaagccccatgttggagtggtgtagtgttgaaaacatggcatactcatacattagataaccaggtttcaattctggtttggaagcctttggatatttgcattacccatttgaattctctcttgggctgtgtttggtttggggttttgtacttgtttttttttttttaactagatgttttgaggcacttggtactgtggacatgtgtcagtcttaaatatttgggttttgagcatatcaagggcttggtttgcagttgacagttgaatagcagtcttcttccttccattccttacagattctcctgttcagagtcaaccattgaatagcatatttattgtttctgcctgtgtgtctgttagtgctcatatggtctagttcctgagttaagaagtatagggtagtggtcatcttttttctttgacttgattcctgcgtactgtgaatgcagagcaatgcaggatatgttgggttttctacaaacagagcatcagcccagagacatgtttgcatttgtttctgtcaggtttcctggctcaactggcaccctttaaggccagagaacgttagtttaggcacttttcctagtaaaatacttcttgtggctcttcctgtgtacttggaataaaggaggcattccattgttagacatgcttgggtagttcagggtaatcttagagtcatgagagatatgatataaaggaataactagctaaaccagaaaaaatgcctgggtaatgactagcaaataggtggtcaacagatgtcctcattagattgaaaggtccatgaaagcagggactatttcttttctttactgcttaaaaaggttagaactggacctggcaacatatgatgagctaaataaatacatatttgtgaattgggttaacacatattgcataaagtggttttggctctgttttattcttcataagccctagtgatctttttaatttctgtaaaatgtggtcttgacccccccaacccaagtgacctccttatttgctaggctctgatatttctgttaggtttctactgtattttctgagatagcaattagtagatactatttctcctttgatggagctagccatatattcttgtttgttcattttagctttcaaatttctgtctgattcttgttcttttactctggaatgtagtgaatggaatgacttggaaggtacaaggtaggtcagtttaggttgtctagggccttgcatttaaaagtttaatttgatgacatggtggattacaagaatgtaacagtatcaaaatgatactatcttcttgtggtggtatgtagacttaaaaagagaaactgcagagaaaagggtcccttaggatgtagagcagcagttgatatgtgagaagttgatgccttgcattagggattaggagtagatgtggaaggaagagatcaggtttgaaagagtttaaacaaagaatctctaggatttgataacactggatatcagaggggaaggtacaagagagagggcagaatcaaaggccactcagaggttaaaggaatcataccggtttggcatggtggctcacgcctgtcatcccagcactttgggaggctgaggcgggcagatcacgaggtcaggagttcgagaccagcctagccaatatggcgaaaccccgtctctactaaaaatacaaaaattagctgggcgtggtggcgtgtacctgtaggcccagctactcaggagactgaggcagaagaatcacttgaacccaggaggcagaggttgcagtgagccgagatcgtgccactgcactccagccagggcgacagagcgagactctgtctcaaaaaataataataataataaataaataaaggagtaattccaacacttgggaggccgaggcaggaggattgcttgagcccaggagttcaagaccagcctgggcaacatagtaaaacctcatcgctataaaaattttttaaaaagaaatttagccaggcatggtggtgtgcccctgtagttcccattactagagaggttgaggtggaaggatctcttgaacccaagaggtcgagagtacagtgagccatgatgcaccagggcactccagcatgggcaacagagtgagactttgggaggccatggcagaaggattgcttgagcccaggagttcgagaccagcctgggcaatgtagtgggaccttgtctctataaaaattttacaaatatatataaaagctgggcatgggggcacgtgcctgtagtcccagtgactggtgggtggggcgggggtgaggtgggagaatcacttgggcccaggaagtcgagattgcagtgagccatgatcatgccactgctctctagcctgggtgacagagtgagactctttttgtcttaaaaaaaaaaaaaaaaaaaaaaaaaaatggttgtaccttgaacagatacaaagcatgtagaagaggaaagcatttgggagggagaataattggttggatacattaagtgtcaagtgacagtaggacctctagaaatacacaaacagagctccacaggttttttcattgtcatttcttataccttttgttccactacctacttttttcctacaactttctgtttattttatagtttatgaattttaagcaaaatacttccttctgcctcttaccagtaattttcaaaagcgtctgtattggttaggattagatttggctgggaatgacagaaaactaaaaataaaagcagtttaaacaagtttatttctctctaatgcaaatgaagtttgagctgtccaggctttcttatggtggtttggtcatgatcagggacccaggttctttcaaccatgtagccccatcttaacatgtgatttctatcttattgttcaagatggctatttgagtgtcagttatcagttttatttagcaaccaatgggaaggaagggggatgaaaatgggccctgtctttaaggatacttcctggacatagtgagtagaaggatggttaccagagtatgggaagggtagttagggggctggggggaaggtgggaatggtaaaggggtataaaaaaggtagaatgagtaagaccatcagagaaatgcaaatcaaaaccacaatgatataggtggctcacgcctatatgtatctcacaccagttagaatagtgatcagtaaaaagccaggaaacaacaggtgctggagaggatgtggagaaacaggaacacttttacactgttggtgggactgtaaactagttcagccattgtggaagacagtgtggcgattcctcaaggatctagaactagaaataccatttgacccagccatcccattactgggtatatacccaaaggattataaatcatgctgctataaagacacatgcacatgtatgtttattgcggcactattcacaatagcaaagacttggaaccaatccaaatgtccatcaatgatagactggattaagaaaatgtggcacatatacaccatggaatactatgcagcaataaaaaaggatgagttcatgtcctttgtagggacatggatgaagctgtaaaccatcattctgagcaaactatctaagggcagaaaaccggacaccacatgttctcacttatacgtgggaattgaacaatgagaacacttggacacagagcggggaacatcacacactggggcctgtcgtggggtgggggaggggggagtgatagcattaggagatatacttaatgtaaatgacgagttaatgggtgcagcacaccaacatggcacatgtatacatgtgtaacaaacctgcacattgtgcaccatgtaccctagaacttaaagtataaaaaaaaagacctactatttgataccacaatagggtgagtatagtcaataatgacttaattgtacattttaaaataacataaaaagaaaaaaataaaataatgcagagtataatttgattggttgtaactcaaaagataaatgcatgaggggatggatactctattccccatgatatgcttatttcacattgcatgcctgtatcaaaacatctcctgtactccataaataaatacacctactatgtatccacaaaaatttcttaaaaaaggatacttttgagcgtttcaagcattacttctagttatgttcagttgatcagaatttagtcatagccacacttcagcttcaaggagggctgcagaacgtctttattttaggcagctatgtgcccagttaaaaagcagattttctcccaaggtaaagagagcagataggcattaggagactactagtagtcttttaattttccaggccgggcacggtggctcacacctgtaatcccagcactttgggaggtcgaggcaggcggatcatgagatcaagagatggagaccatcctggccaacatggtgaaaccccatctctactaaaaaaaatacaaaaattagctgggcgtggtggtgcgtgcctgtagtccaagctactcaggaggctgaggcaggagaattggttgaacccaggaggtggaggttgcagtgagcgaaggtcgtgccattgcgctccagcctggcaacagggcgagactccatctcaaaaaaaaaaaaaaaaaagcagggatttgctcccaaggtaagagagcaaatagacattgggagactattagtagtctcttaatttcccagaatgagaaccagattctttccggttacagaactcgtttctccaaacattaattattcttataataattttaaaaaatactaaatatataattatcaccagccaaatgcttcttttaagaaatagagacagggggccgggcacggtggctcacgcctataatcccagcactttgggaggccgaggcaggtggatcacctaaggtcagagttcgagactagcctggccaacatggggaaaccctgtctctactaaaaatacaaaattagccgggcatggtggtgcatgcctgtaattccagctattcgggaggctgaggcaggagaaccgcttgaaacaaggaggcagaggttgcagtgagccgagatcgtgccattgcactccaacctgggcaacaagagcaaaactccatctcaaaaaaaaaagaaaaagaaatagagaagagacagggaagccaagctcatgcctgtaatcacagcacttcgggaggccaaggtgggcagatcacctgaggtcaggagtttgagaccagcctggccaacatggagaaacccagtctctactaaaaatacaaaaattagctgggcatggtggtgcataccggtaatcccagctactcaggaggctcagacaggagaagtgcttgaacccgggaggcagaggttgcagtgagccaagactgtgccactgcactccagcctgggtgacagagtgagactctgtctcgaaaagaaaaaaaagaaaaagagacggggcctcacatatgtacagtggtatgatccgtagttcactataatcttgagctcctgaaacctgatgctttaaaacaaaacagtacaaaactactaaatttataattaaatatataaataaaatataataaaaatgttcacttctgtttttatattctttaaaatgacccataggctggtgattagtaactaaagcatatgctgtggaacatccagcactgatgtaagtatatgaagtttgaatgccaggtcagtagattcagaagctaagttactgtatggtaaagaccatgttttgcctgagcagctttggatatggttttttcttttttttctttttttgagatggagtctcgctctgtcaccaggtggagtgcagtggcgtaatctcagctcactgcaagctctgcctcccaggttcaagtaattctgcctcagcctcccgagtagctggggctacaggtgcataccaccacgcccagctaatttttgtatttttagtagagatggggttttaccatgtaggccaggatggtctcaatctcccgacctcgtgatccccctgccttggcctcccaaagtggtaggattacaggactgagccacagcacttggccggatatagtttttctatgtgtgtttttcctaaaccttattatacataaacatacaaggacagagatcaaatgccccctgtctagaaacaccatttctgccaggcccatcttaataagactatgtcttctttttatttgtttctatacttccttttttttttttttttttctgagacagggtttcactcttgttgccaccacactcagctaatttttgtgtttttagtagagacaaggtttcatcatgttagccaggctggtctggaactcctgacctgaagtgatccccccacctcggcatcccgaagtgctgggattacaagcgtgagccatcacgctcagcctagacttcttagtgtggtgtttcattttcttttctctggttcccatccagctttgttcattgtacatgctcacggtgcactttatatgacctgttggcatattttctcactctctttttgtctctcttcacttccagcagtgttaaataactctttccattctgcagttttcctgataagaatttcagatggtggtggccaggtgcggtggctcacgcctgtaatcccagcactttgggaggccaaggcggcagatcacttgaggtcaggagtttgagaccagcctggccaacatggcgaaaccccatctctactaaaaatacaaaagctagccgggtgtagtagcgcatgcttgtaatcccagctactagggaggctgagtcaggagaattgcttgaacccgggaggcggaagttgcagtgagccgagatcacaacactgcactccagcctgggcgacagagcgagactccgtctccaaaaaaaaaggcaatgaataattggacaaggaaccaaaacttttattctgaaaagagaaaattccagtctatagcaagggcagttttccttctaaggaacagtactgatatatcatggctaaagaagcaggctcagcttctttgtccctttcactaatttgctatggcttctaacataggctaggaaaagaaaaaaatctgtttctctttctcctctcctctcctctcctcttccctctcctctcctctcctctcatcttccctcccctcccctcccctctcctcccctactcccctctcctcccctcccctctctttatctgtctatctgctaagggcagcaaatctgtatccatacaggtctgcagcaacttcaattcttgcctcctcagaagaaacaatttgactgagggtcataaggcagaaggagagaccaaggcaagttttacaacaggagagagtttatttaaaagctttagaacaggaatgaaaggaaggaaagtacacttggaagagggccaagcaggtgacctgaaagacaagtgcaccaacacatagcctttcaacaggatagagagcagttaaaactgccctggaaaagccagacttacaggctactctgtataatagaaacttcaggacagggtgcggtggctcacacctgtaatctcagcactttgggaggccgaggtgggcggatcacgaggtcagaagatcgagaccatcctggctaatacggtgaaaccccgtctctactaaaaatacaaaaaattagccgggcatggtggcgggtgcctgtagtcccagctacttgggaggctgaggcaggagaatggtgtgaacctgggaagcggagcttgcagtgagctgagatcatgccattgcactccagcctggtcgacagagccagactccgtctcaaaaaaaaataaataaaaaagaaacttcagcatgcttcctaatactgttcaaaggtctccctttttatgattttatttaaaaaaattttttttttttgagacagagtctcactctgttgcccaggctggaacgcagtggcgtgatttcggctcactgcaacctcccctcccaggttcaagcaattctcgtgcctcagcctcctgagtagctgggattacaggtgcccaccaccatgtctggctaatttttttgtatttttaatagagacagggtttcaccatcttggccaggctagtcttgaactccacaccttgtgatccacccaccttggcctcccaaagtgctgggattacagacgtgagccactgcgcccagctcaatttttatatttttggtacagaccaggtttcactatattggccaggctgttctcaaactcctgacctcagttgattcgcccacctcagctcccaaagtgctgggattacaggcatgagccactgcgcccagcagggtctccctttttaaacgtattttctttttatagcctacaaactacaagagatgccttttaataaactggatggtatgtcttaacgtctgatggagtttaaaggcatccaagggttacgtctgtgatagattgccaaggcatacaggtctgatcaggagagtttcttgatgactagctatgggctatgcctttgtagcacatgatcccaactccagcagggatatagttagtgacatgctggctttgtcttctccctaactcctggattactacaaatttcttcttcgtgcaggaatcattccctcactctatacatatctgctgttaaaaaaaaaaaagttaagatattatagccattatattgtagcagccatgatattatagctcagtaaatgctgctttccaaatattggctaatttaaccatagcatgtcttcaatgttagaagccagccctcatttttatcaagggctgaagtttgataattctttgtgttatttgcttgtgaaaataagtagaacaaaaaggattagggacctaaccttgtatcccatgtatcccagtgaaccttttctgacttaaagcttcctttctttttttttggagatgggagtcttgctctgtcgcgaggctagagtgcagtggcgcgatcttggctcactgcagcctccgcctcctgggttcaagtgattctcctgcctcagcctcccaagtaattgggactacaggctcatgccaccatgcccagctaattttttttttaatttttagtagagacggggcttcaccatgttggccagtatggtctcgatctcttgacctcgtgatccatccaccttggcctcccaaaaagcttccattcttagtcttggtacttctaagtggcattgggtcaatagctttctgcctaagaagagaattggctgggcatgatggctaacacctgtaattccagccctttgggaggctgtggcaggaggatcatttgagcccaggagttcaagaccagccggggcatcataggaagaccccatgtctgcataaaataaaataaattagccagacttggtgacatgcacgtattgtcccagcttgtcaggaagctgaggtgggatgattgcttgagctcaggagatcaaggctacaatgagctatgatcatacaacaccagtgcactctagcctgagtgacagagcaagaccctgtctcaaaaaaagcaggggggcatagtcacctccctaaaatattagttgaacagtatgtattcagaagtccagaggctctgtattttattaatattttcaaggcactatttctgcagaaatcaagtcagcaagactctttgaggacgttacaggcagaggggctaaagatacctttgaggaagctcaagtacttgggtgggaggtgatagataaagggtcagtagaaataatgtctctttttattttttttcccattaaaaaattttgttttaatagcaatggagatggggtctcactgtgttccctgagctggtctggtctcgagctcctgggttcaagcagttctcccaccttgaccttctaaagtgtagggattatagacatgagccaccatgcgtggcaaatttcttttctttcctttttttttttttttttttgagacagagttttgctcttgttgcccaggctggagtgtggtggcacgatcttggttcactgcaccctccacctcccaggttcaggtgattctcttgcctcagcctcctgagtagctgggattacaggcgcccgccaccatgcccgggtaatttttgtatttttagtagagatgggatttcaccatgttggccaggctggtcttgaactcctgacctcaggtgatccacccgcctcagcctcccaaagtgctgggattacaggtgtgagccaccgctgccggttccaatgtctcttttggatggtggatcctgaagaatagctgctggttctttggggatgcctggggaatactgtgcaggctttgtgatgggctcagcagtgaggcctgtacagtatcttaggtcttgtgggcctcagtctgctctcttggctgttctctaccacctcctgccattaagtttttaagaaaaaggaatagttttattatattctttggtaaacaaagcaaattaagaagctttatattttccacatttatttaccaaactccctatttgtttttctctatagtgattcagtttagagacctattcaatgaagcatgccttgatgttgaatttagagtctactttttccagaagaaaagagccagggagctccaatagtagtcatctcagaatataaaagtgttatagaaatgatgtaaatcaggccgggtacaggggctcacgcctgtaatcccagcactttgggaggccgaggcgggcggatcatgaggtccggagatcgagaacatcctggctaacagggtgaaaccccgtctctactaaaaatacaaaaaaaatcagccaggtgtggtggccggcacctgtagtcccaactactcaggaggctgagacaggagaatggcgtgaacccaggaggaagagcttgcagtgagccgagatcgcgccactgcactccagcctaggcaacagagcaagactccgtccccaaaaaaagaagaaaaagaagaaaagaaatgatgtaaatcagctgcccttcactctgtgttgaggtgggggatgtccctaattgcagtaggagagagcctctcttttatctgggactaaaagcccttgccctacatacctcataattattttagggttaactgattcaattgtcagaaaagaacaagctgtatcttgtttctgtacatattctactttgtgagtatttttatttcattgctatgtgattggaatcaactcaggaaagaggaaaaaaataagatagaggttatagaattctgaattctgaagggaattctgagaattatcagtaaaatatgtcaaaatgtgatattttacttccaccaagaattaggccatatctttgtgtgaaaataaattattattatttatttatttattttgagatggagtctcgctcttttcacccaggctggagtgcaatcacacaatctcggctcgctgcaacctccacctcccaggttcaagcgatgctcctgcctcagcctcccgagtagctgggattagaagcgcccattaccacacccagctaattttgtacttgtagtagagacagggtttcaccatgttggccaggctggtctcgaactcctgacctcaggtgatccaccccccccccccccacccttggtctcccaaagtgctgggattacaggcatgggccaccgcacccagcatacggaaataaattattaaccagagaaattttgactaaggtttttataaatgttaggtgaaccattgctctaaaagatacaaaattataacaagctgaaaagttttttaaaaatctgcattttagtggttcagtttttcagttgttctgagtgctaatagttggagtttataaattgtaagaagcaatctacggagattctgtgatgaaggaatttgttgaatgccctgtctgcctcacagtctcagtctttatgatagagtcttgtcttctcacaaggagagaaaagatttgaggctcttttgattacttacttacttgcttatttatatattttgcctctttgtttttgccgcaaatacaaatgtaatggaaccttagaataggagagacgtgtggatcccctggtaggcactgttctttctatgttcctggagccaagttcatggaattacctccaagactacggatccctggttttctttcatcatgataggaggcattttctagaacctgaatcttactttaaaatgcatgtaagacctgcaaggagtggtagtgaagtgggtggaatatattcttagcaccagacacctttaaaatatttaagttctcggccgggtgccctggctcacgcctgtaatcccaacactttgggaggccgaggtgggcagctcacgaggtcaggagaccgagaccatcctggctaacacggtgaaaccccatctctactaaaaatacaaaaaattagccaggcgtggtgatgggtgcctgtagtcccagctactcgggaggctgaggcaggaaaattgcatgaacccgggaggcagagcttgcagtgagctgagatcgcaccactgcactccagcctgggtgacagagcaaggctccttctcaaaaaaaaaaaaaaaaaaaaaaaaaaatatatatatatatatatatatacacacacacacacacacacacacgtgtgtatatatatacacacacacatgcatatatatatacacacacatgtatatctatagatatatacatatatatgtgtatatttacattttcttatgtcagggtctggcttggagtgtattgtgttcccagagcagaattcttttttttttttttgagattgggtcttactttgtcacccaggctggaatgcaatggcgtgagcttggctcactgcagcctcgacctcacaggttcaagcaaccctcccacctcagcccctggagtagttaggataacaggcgcacactaccattttgtattttttgtagaggcggggttttatcacattgcccaggctggtctcgaactcctgagctcaagcaatccacctgccttgacctccccaaatgctggggttacaggcgtgagccactgtgcccagccgcagagttcatcttgagaccctgacttctgccagctctgatcctagtgggtggggctctggggctcagtgaaacagtcagccgttttgcttcagagaacacaaataagattttggcttgatgctggttgttgctggcgtcatatagtctaaaacgtttgctgtcaagaacattttagtaaaagtttttgttgtgctttcatctagtcaagaaaagataggaagtggcagctgacagggcagtgtcttcatgcccctcaaccttacattggacactgaagtaggattgtgttttcactggaagtcccagtggggccttatctcctggatgctcaaagtgcagctcagatcctgttgggtaaaaagtctagtcaaaatggaggacatggagaaggccaacaggcagagctatagagctgacatagggcattctttgtacttcccttagccactgtactttctttcttcctccatctcctccttccctcttctatctcattttggtttggcctttgggaatagtgggttttaaaaaatatttgaactataacatatccttgtaccataaagaatgagcctgactgctttacaaaggatttctataaaaagtaatcttttatactaagagaaatgacacatctgttttaaacctgttacttttcttccccgggctttgctctttctgcaggtccgtttgacatggttcttgaaactcctggtagcagccatttactagtagcactctttatcttagacacagcacctaaagcaattgtaggtgttttaagaacagaaagcccatcttaagcagaccagtttgagggattggcagtgctgtcaagaaacaagggctttgtggcagtctctctaaaaactccctatgagtccatttcttgcaaacttctttagactctactgtatcttttcatcagaagctacctctttgatgtgggaagtgtcatgaatggactgactctctggaatttaaaaacaaagacaatatggcaaaaagaaaacctgacttttagtactgtatgtgttgctaattagctctgtattcttgggcagactactccatgtatcccagccatccatatgccctatttgtaaggatctaatgagatgatattgtgaagaatgcctttgtaaactgtaaattgctttgtgaataaagatactatctctgataaacagtaccagttctcagccaccaataacctgatactcccatactgtgtttggaagaaacacaaaacaatgaagagtaattgtgacttttcaatgtgagttgtattcacaaagctcatatactttttccctgccttttgatactgtttatcgctttctgtgttgtaatgggaagatcacacagcaatcattttctcagtacaaagtataactacaactgagcttgcattgaagatctttaacaaagatgcaaagctgctgtccagaaatgttttctttccattttctcttgtacctcccagtattttaagaatccttgaggctgggcaccataactcacgcctgtaatctcaacactttgggaagctgaggcaggaggatcacttgggcccaggagtttgagaccagcctgggcaacatagtgagacccccatctctacaaaaaaatttaaaaattagctgggcatggtggtgtgcacctgtggtctcagctacttagggaggctgaggtaggaggattgcttgagcctgggaggtcaaggctgcagtcagtcatgattgcaccactgtgctctatctagcctccaacctgggcaacagaagcgagaccctgtcttttttttaaaaaaaaaagactatccttgatgattggttttgagccaacggaatgggagcatatggtagagtttcaacactctgaccctagtccttctgacaggcagtcacaaaatgagatcatgaagtctctaagagcagctgatgaaaaaggaaatgggaatgtagatgttcaatcagcagccctccagacccagagtttgctcctctgtggtgtctctaggtggagaataaggacttgatttgccattctggagtgcaaatatctagctttttgcagcttcatattaagatttcttgaaatgtacttagtaatatccatgtgtgactttgccaagtgatggctttgggctggaaaggattttagcaggttttagtctaatttaagcctaatctaacactgctgagaaaggaggagatgtctttggttttactttctaatatatggtacctcttagccgggtgcagtggctcatgcctgtaatcccagcacttcgggaggccgaggcaggcgatcactttaggccaggagttcaagaccagcctggccaacatggtgaaaccccatctctactaaaaatacaaaaattatcccggtgtagtggcgcacacctgtaatcccagctacttgggaggcagaaacaggagaatcgcttgaacctgggaggcagaggttgcagtgtgccaagatcatgccactgcatgccactccagcctgggcaacagagcaagaccctgtctcaaaaaaaaaaaagagagatctatctctcttctttttatatacatatacatatacatacatacatacatatatgtatgtacacacatatatatatatggcccctctttttttatttgagtcggaatctggctctcttgccaggctagagtgcagtggcatgatcttggctcactgcaacctctgacttcctggttcaaacggttctcctgcctcagcctcccgagtagctgggattacaagcatgtgccaccacacccagctcacttttgtatttttagtagagacgggatttcaccatgttggcagggatggtcttgatctcctgaccttgtgatcctcccacctcagcctcccaaagtgctgggattacaggcatgggccaccgtgcccagcctttttttttttttttttaaagagacggagtctcactctgtcacccaggctggagtgcagtggcgtgatcttggctcagtgcaacctccacctcccgggttctagcaattctgcctcagtcttccgactggctgggactgcaggtgtatatcaccgcaaccagctaattttttgtattttagtagagacagggtttcactgtgttgcccaggctggtctcgaactgagctcaggcagtccacccgcctcggcctcccaaagtgctaggattacaggcgtgagccaccgtgcctggcctatatggtacctctttaggagccagacctggttaatcagacacatggctttcatgactcctttgcttgagtagcttaataactcaataaatcaaaagatgaataaatattctaatgtgtgaagatactctaatagataataggcaattaagaatggacatccacggctgggcgctggggctcatgcctgtaatcccagcactttgggaggctgaggcgggtggatcatgaggtcaggaggtagagcccatcctggccaacatggtgaaaccccatctctgctaaaatacaagctactcgagaggccgaggcaggagaattgctcgaacttgggaggcggaggttgcagtgagccaaaatcgcatcactgcactccagcctggcgacagagcgagactccgtctcaaaaaaaaaaaaaaagaatggacatctactgaaggtgattgcatcatcctacccattcattaatctaactccctacaggatactttcctaggagacactgacaggtctgttttctgaaatccagagaaaggcagcaatggggaggggtgcagtgtatgtatgtcatacctgtgcttggtatatctgagttgcctgtgtatgatagcagctggggaatcaaatcatagataaattgttctcatacaggtttgtcctatgactacctattcttattaaacaattggctatattgaccctttttggttttggaaaaataataataatttttttaagagagaaaaagaaacaattggctacccttcaacagtgatgttaaaaccatttcacattctttagcagtggtcactgtcctatgtctaactatgtgcaggttgagaaaaaggactgcccgagttatagatgattctgtgagaataagaaatcattgcttttgtaacacatgaggtaaaagtaatctcaaagttgacatgctgatggggactcctggcaaggggagttccctgccctcaacaaaaggtcatccacagctactggaacatttttgttgtctgagaagtataaagtgccttagaaatacctgaatccattaatgcctccagttggtgaaatcagaatttgcaggtgactgaaattgacagtagtgccttgttcttactcactgttcaaatgacaacccacatgttttatggattgggtatacagatgtatgctctaacagcagtatctccctccagagccactgtgtaccaagcaccaggtcctccagggatagttggctctattcagtctttgattcattcaacaagagcttactaagctcctttttggtaccagatactctttgttgctgaaaataaataaaaggccagcaagattaagtagactgtgagatctggaccagtaatttgacaacacaaagtactgtcgtaaagatacagtttctgatgtgtagtgaccattccgtatgaaagcttagtctttcaggagattaaaatgggtggtggaatattcctacctagcaagcaagcaaggtgaaatgagtggctgtttgactcccacctgctgatgctggtcttttttggttcctagggcttataatgatcaacatttcttgagccctcactatattctatgctaagctctttacatgtatgaatttacttaatcttcacaaccaccctaagaaataggtactgttgtccttactttacagatgaggaaatggaagcacaaagaagttaaggaccttgctgaaggtcatggagtagaggcaggattcaaatttagggaactcagcctacagtccatgctcttaaagatgttatatcctgtctctgggcttagaaggggttcatcttaggccggacacagtggctcacgtctgtaatcccagcactttgggaggccaaagcgggcagatcacgaggtcaggagttcgagaccagcctgaccaacatagtgaaaccccatctctactaaaaatacaaaaattagccaggcatggtggtgtgcgcctgtagtcccagctactcgggaggctgaggcaggagaattgcttgaacctgggaggcggaggttgtggtgagccgagatcgtgccactgtacttgagagtgagtgacagagcaagactctgtctcaaaaaaaaaaaaaagacggccaggcgcagtggcttacgcctgtaatcccagcactttgggaggccgaggtgggcggattacctaaggttgggaattcgagaccagcctgaccaacgtggagaaaccccgtctctactaaaaatacaaaattagccaagcgtggtggcatatatctataatcccagctactcgggaggctgaggcaggagactcgcttgaacctgggaggcggaggttgcagtgagccgagatcacgccatagcactccagcctgggcaacaagagcgaaactctgtctcagggaaaaaaaaaaaaaaaaaaggagggggcgcttcatcttgactaacttcctgcattggtggagcttgatagagtggtccttcccagatccttccctgcatacagagcctgtctcttttctgattggtccctaaggccagattacctgtccctaatactgagcagaagctggtgaatgaaacaggagatccctcagtcaaaacaaaaggaaaaagaaaaatgaaacaggagatcccttctctacagcccagatgtaagtccagctgtgcccttcaccacctgggtgaccccacctctgtgaacataggtcctcatctgtaaagtgtagataatgttatttcatcggatcatttaggggattaaataagataatgtacttcgtggtttctggctcttagtaagtgcttaataaatgttagcgatttttattatcattgtccttagccttgagaacaagccagggaatagtgtctcagaccagatgctaagacctaggtagatgggcaattttccttggttttgacaagacaataattttatcctgtgtatttctcttgacttttttgatgtgaaaagcagagaggtaaagcattatttgacagatgtatggattcaagcaagaaactgaggtccaattgcaaagaaatggcttgtataactcagagccctgtctgaggaaacacagaggaccctagagggcggagaatgaacacagcgcaggggctagttccagagtcgcattctcggttagttcactttcaagtgtgggtgagggtcccttgtcagtaggcagagaatttttttcccctgcaccaacacatacctgctgcctagtgtttattaaacaaaactttattttaatgtgaaatagaattcatgacttgtccaaaatggagaggcaagggagctctttaacaggcttgttgagccccttttcccacctgttcctgtgccagactttcccaaaggcttacttgccaatggttgctcctcagatctcagggctagctcactctataggctccaagccagagtgataccgccgccgccgctgttgctcccaccagccaatcagtttcctgctgtaaggatgtaacttgctgtgaagctttcaccttcctcctttcttcctgtcttcaatgttgtatgtctttgtcctggtgcttttgccatacagccagtgtttcaaagaaaattttcaggcactaaagttatagcccttactacctttccaaggagatgtgagatagctgtggaaaagaagagggctcctctgcctctgtgcagaaggaacagtttacttcttgatagtgtgctagctcctgagctaggtgggggacttgctgggattcaagagagtgcattacctgacctctggacaagtagactgggcatagcctgcccaaggacagcaccctaacctgcaggaaccaaggccgaagactgatttcaccttctcgtactcccctttcctaagctaaagcttgctctgtaacactgccccaggtctgtggcttaaaacagccatttcctttcaccagtgaattaagctcactctttataaaatgtttcagcttggggattggaaaggctctctgtgcctttctgtctctgtctgtttctccaagggttgatgttgatggcttctgtctttgtctttacagggaactctaatgatccaggacaaagaagttaccctggagtatgtatcaagcctggatttttggtactgcaaacgagtaagtaccaagaatccctttctttagaagtaagtatctggaataacagctcctccatatctctaggaaggctgcctgctaacatgcattcccaaggacaaagctcttcttcctcaggtcacttcagttgaacaggaggaggtcaagacaaggtcattcataatttctccttcccagctgctacatgtggccatagagagttctggacctgcaattggagacactttcccaaggacatgtgccattatttctatcagttataaaaataacagttccttgacatataatatcttctcacctctcctgggggtggtcataaaggaattcttggttggaaaagtaggtttggagagactagttctttgggagtcgtacattttttggatattcttgggtttccaagggtatagaacttcagacaccatggcattttacctctattaaactccatattctcttagagtgggatatttaaaattttaggctatactctttttttttgaaacggaatctcattctgttgcccaggctagagtgcaatggcgtgatttccactcactacaacctctggctcctgggttccagtgattctgctgcctcagcctcccgagtagctgggattacaggcacttgccacctcacctgcctgatttttgtatttttagtagagatggggtttcaccatgttggccaggctggtcttgaactccgacctcaagtgatccacctgcctcagcctcccaaagtgctgggattataggcatgagccaccgcgctggcctgtttatttatttatttatttattttgagacagagtcttgctctgtcgcccaggctggagtgcagtggcgcgatctcagctcactacaacctctgccacccgggttcaaacgattctcctgccccagcctcccgagtagctaggattacagttgtgtgccaccatgctcagctaatttttttgtagtttttagtagagatggggtttcaccatcttggccaggctggtcttgaactcctgacctcattatccacccacctcggcctcccaaagtattgagattacaggcttgagccacggcacccagccggctatactctttaaaggtccagtttgattgcagtgagcatgaaaatataatttgttttcattgctactacttagtatcaaaaataattatgaaaaatatataaagtttctgagccccgacacactaaaaatgttacagtacttgaaaaaatttagtaaagactttagcttgacatttgttagtctcggtagaattgacattgtgttagtctcggtagaatacaacttgaagagctatgattgttattagccaaagtactcatatttcatggatatactcccttatggtgtcattttaggaagatatttcgtttccttttattgagataaaatacatgtaacattacatttgccattttaaccattttgaagcattaattcagtgacattaagtaccttcacaatgttgtgcagctatcaacactacttcctagaacttcttttttttttttttttaaataagagatgggatctcactatgttgcccaggctggtctcacagtccctggctcaagtcatcctctcacctcaacctcccaaatagctgggactataggtgccatcatgtccaggttagttccagaaattttttttttctgtcttttttttgagacaggatctcactcttgtttctcaagctggagtacagtgatgtgatcatggctcactgtacccttgacctcctgtgctcaagcgatcctctcaccttggcctcccgaagttctgggattacaggtgtgagctgccatatctagcctcagatcttttttaaaccctcaaaaggaaacctcttatcattaatcagtaacttcccacttcttcttcccccagtccccagaaaccattaatcttttttctatctccatggatttgcctattccggatatttcatataaatggaatcaaaatatgtaaacttttctgttggcctttcacctagcatgttttcagagttcatgtatgttgcagtatttatcagtacctcatttctttttgtggctaaataatatgaatatatcacattttgttcatccattcctcaattgatggacatttgggttgtttctaccctgactttggtgaataatagaacctttgtgtgctagtttttgtttgaacagctgttttcagttatttgggggtatgtatccaggagtggaattgctgagtcatatggtaattttatatttaactctttgaggaaccatcaaactgtatttcttttattttattagcaaaccttttcatagaccacagctgtaccattttatattccagcaatatgtaagggcttcatttctccacctgcttgccaacatttgttcttttccctttatttgataatagccatcctaatgggtatgaaataatatctcattgtggttttgatttgcattttcctaatgactttgagggttttttttcatgtgtttgttggccatttgtatacctcctttggagaaatgttcaaccaagtcctctgccctttggaattgatttgcatgtatttttgttgttgagttataagagtactttatattttctggatattaatcccttatcagatatatgatttataaatattttctatgtgttatctttcactttcttgagagtatcctttctaaagaaaaaaaaagagagagagagagataaggtgtggctcatggctgtaatcccaacactttgggaggctaaagtgggcagatcacttgagcccaggagttcgagaccagcctgggcaacatggcaaaaccccatctctacaaaaaatacaaaatttaactgggtgtggtggtgcatgcctatgatcgcggctactaagcaggctgaggtgggaggatcacctgagcccaggaggtcgaggcatcagtgagctatgatagtgccactgtacttcagtactccatcctgggtgacagagcaagaccttgtctcaaaattttttttagctgggtgtggtggctcacgcctataatcccagcactttgggaggccgaggcaggcggatcatctgaggtcgggagttggagatcagcctgaccaacatggagaaaccccatctctattaaaaatacaaagttagctgggcatggtggcacatgcctgtaatcccagctacttgggaggccgaggcaggagaatcacttgaacctgggaggcagaggttgcggtgagctgaaattgcactattgcactccagcctggacatcaagagtgaaactccatctcaaaaacaaaaaagaaaaattttaagtttattatgtacctattaaaatttttttgtaattaaaacaaatgctaatggcggtattattcataatagccaaaaaatggaaataaccaaaatgtccattggctgatggatggatgaacaagttggcatatccatacaatgaaatgctatttgacaatgaaaaggaatgaagtactgatgcatgttacaacctagatgaaccttgaaaatactatgccagacacagaagaccatacattgcacaattccatgtccctaggggtaagaatgggggaggtaactccactagatttcttttggggtgatgaaaatgtttcagaattagattatggtgatggttgcactatacatttactaaaaatcattgaattgtacacataaaataggtaaactttatggggtttgtttttgtttttaagagagagtcttggtttgtcacccaggctggattgcagtggcacaatctcggctcacgacaacctccacctcccaggttcaagtgattctcgtgcctcagcctcccaagtagctgggattacaggcgtgtgccaccatccccagctaatttttgtatttttaatagagatgaggtttctccatgttggctaggctggtcttgaactcctggcccgaaatgatccaacttcctcggcctcccaaagtactgggattactggcatgagccatcatgccaggcctgttttatgctatttaaattatacctactaaggttaggatcctaactgccactcactaactgaagtgtcacatactttattcgttggcatgtatatactcagttgtcccagcaccatttgttgaagagactattctttccccattggcactttccccattgttagaaatcagttgaccataatctataggtttattcctagattctcagttttattctgttgatctatatgtttacaaatagcaccagttaccacagcagctctcctgtagtaacaactctccaatcccagtagcttaaaacagcaagcatattcttcactcacattacatgtcagggactatgggttgtttgctacagttctgttccacgtggcttctcatcccaggacccaggcggaagaaacagtctcaatatggggcagtgtccctctggctaagggagagagaggttcattcacgcaagcagtggctcctaaggcttctcttagacctagtgtaggtcatgttcactcatgttttattggtgaaagcaaggaaggcacatggccaaggctgacaatggagagaggaagtatactcaccctgtgggaaggcataacagccatttggcagtgggcaggggtgtgtgtgtgtgtgtgtgtgtgtgtgtgtgtgtgtgtgtgtgtgtgtgtttataatctgtttatagggaagggaacaatgaaataactgactgtagtgatcttcctcaagtgagttaacctctctaggcctcagtttcctcatctacaaaatgaggagataagagtacccatttcatgaagtttattggggttgtcaggatcaataagtgatgacatatacagtaggccaaatacatggtatgtactatttaagaattagccggctgggcgcagtgactcacacctataatcccagcaatttgggaggccgaggcgggcagatcacctgaggtcgggagttcgagaccagcctgaccaacatggagaaaccctgcctctactaaaaatacaaaattagccaggtgtagtggcacatgcctgtaatcccggctactcgggaggctgaggcaggagaatcgcttgaacccgggaggtggaggttgtggtaagccgagatcatgccgttgcactccagcctgggcaacaagagtgaaactccgtctcaaaagaaaaaaaaaaaaagaattagccactgctactattgttattgttttctcctcaactccatctggcagacctttactcgccctataaggccctcctcaaataccatcctctttatagttcttactcttttatttcctgccaaccaagtttctgcccccatggcatttggaagctcagtggcaaaagttcagggatttcggggttgggcagtgtgcttgactttttgttcacatgttcagacaaaaataattacattcacattaaaaatgtctcttaccttattctgggctagtgaatgttccctttcaatgtcttttagatagctgccagagacactatctgtatctcttcctcctaccttgtacctcattatcagtgtttgagaaaggagttgataactgaattctcagttctagccaaatgtgaatggggatctcatagtcagttcaggcccaagttttgggtgcagactgtaaatggctttgggacaataatattctataaaccatgtaacagtagttttctaggcatatttcctataggaatctttatccagggcaaaggcatttgggctgcaccaaagtcccagatgccttgttataaggtagctctcaaacagtagctcatcagatcccatctgccagctctaatcagtggggaatatcagattctttttttaagctttgaggggatctgggatatggcttgtttctttcatttttggggggtttcactttgttagatatacataagatttttaaaaatgttttcagtcaaattgatttccttcttccttacagtgtaaggcaaacattggtgggcaccgatcttcctgttcattctgcaagaacccaagagaaggtgagtggcgaaagtggtagcagtttttatctcgtgcattgagcaaaacaaatttcatgttttccttggctttgaagaattatcatccctaaatccaagttgatctacaaacctttttttttttttttgagatggagtctcgctgtgttgcccaggctggagtgcagtggcaccatcttggctcactgcaacctccagctcccaggttcaagcgattcccctgccctagcctcctgattagctgggattccaggcatgtgccaccacgccctgtagcccggctaatttttttgtatttttagtagagacggggtttcaccatgttggtcaggctggccttgaactcctgaccttgtgacccgacccaccttggcctcccatagtgctgggattacaggtgtgaatcactgcacaaggcctgcaaacctttatttatttatttatttttgagacagagtctcgtactcacccaggctggagtgcagtggcgcaatctcggatcactgcaagctccgcctcccaggttcacgctgttctcctgcctcagcctctctagtagctgggactataggcgcccaccaccatgcccagctaattatttgtattttagtagagacggagtttcaccgtgttagccaggatggtctcgatctcctgacctcgtgatctgtctgcctcagcctcccaaagtgctgcgattacaggcgtgaaccaccacgaccggcccaaacctttcaaaagtgcaatttgagctaggcatggtggctaacgcttgtaatcccagcactttgggaggccaaggcaggtggatcacctgtggtcaggagttcaagaccagcctgaccaacatgccgaaaccctgtctctactaaaattacaaaaattagccacaggtgtggtggcacatgcttggaatcccagctccttgggaggctgagacactagaatcgcttgaacccaggagtcagaggttgcagtgagctgagatctcgccactgcactccagcctaggcaacagagtgagaaaaaaaaaattgcagtttggtgcccaacttaacgtaacctgttagtaaatgatttcagatcttattttcaccagaggaaagagatagggttgtgggctcctaggctaaagtggctaagtgggcagctgagcagaggtcagtatattgttatttggaatacatttaaggattaaggatgttaggttgaaaaagagtctttatgacatcagtctgtgtggcaaacctttctcccactcctacttctttgaagttattgggaatcatttgctctattgttttctcttttacattctgtaagcatttcaggattttcaagagaaaaacatttgttaaaataacagtaaaaacataaataggagaaaataatcaggatgtggggaacattttattattttagaggaataaaactaccagcttctcaagcacttatctttaatgtaaatttctttagagaaatttcaggtaggcaacttcgaagagtcagacacatgcatccataacaacagtcctgtagtcatcccttaaggaaagccacagcatgaccataaaatatagttcagtgcagggattcaggtagccttctgtttgttgcaaggttagagtttaatgtgcctacaaggagtttcttaggtgggcttttgtcctcttgtggagattttactctggtgaagactgaaaggcaggtgttctgaaaatctttaggggaaggctgtgtatgttctagaaaccaaaccaaaatgtgggaaggaggatgaacaactgagatttttgcttgttaggtcacttcaggttaggcaaagttgtgtttttttccccccacaagaaacactttttttcaaagctattccagcaaatgaatagatagttttttgttttttttctttttttttttgagacggagtcttgctctgtcacccaggctgaagtgcagtggcgcaatctcggctcactgcaagctctgcctcccaggttcacgccattctcctgcctcagcctcccaagtagctgggattacaggcacccgccaccgtgcccagctaattttttgtattttcagtagagacagggtttcactgtgttagccaggatggtctcgatctcctgacctcgtgatctgcccgcctcagtctcccaatgtgctgggattacaggcgtgagccaccgctcccggccatgaatagatagtgtatgaaaaccactgggcaccataccactaagatgagacagctttaatctggaaacctgtcactgctattatgtaatctctatattgctctcatataatacctctttttgagccacatggattccagtgaaccctccaagaatgaattagttacaagaatgtgcccctaattataaaacaaactataaagacaaattatcctgctgtagtaggacatttgaaataaatcatttatattttgaaggacgtctgcccattatgtttatttgcatataaaggagctacgtgcagatagggtctgttcctagcttcactggaggagggcctgtggtcttacaggatatgagtagctgtttgagcactgtaacactggaagaagcaaggcttctagatgtgtgtttgggatatgtgtttctactaaaccttaagtaagggccatatcttcggtaattttgtccccagatgtgttgttatcattgattatgatagtcaggttcaaggtgtcatgaaggatttgttatatttaaatgtttagtaggtgatatagagatttcataagattacattttttaaatgcttggatagtttcttctgtgaactatttcatgtcctgtctcagcttcacttaaaatattttgtcaggaactgtcagaggactttttattagatatttctgagataatattaaaagcattccaggccgggcgtgtttgctcacacctgtaatcccagcactctgggaggccgaggcaagtggatcacctgaggtcaggagttcgagaccagcctggccaacatggtgaaacctcgtttctactaaaaatacaaaaaattacctgggcgtggtggtgggcacctgtgatcccagctactctgaaggctgaggcaggagaatcgcttgaacccgggaggcagaggttgcagtgagccaagatcatgccattgcacttcagctgggcaacaagagcaaaactccgtctcaaaaaaaaaaaaaaaaaaaaaaggcattccagtatgagtatttgctggcaggtaaggagaaattacagtagcagtgttttttctttttttttttttttgataaagctttctagagattctctttgtttctgttccactagtgacagaggccaagcaagaattaataacctaccctcagcctcagaaaacatccataccagcaccattggaaaaacagcccaaccagcccctaagaccagctgataaggaacctgaacccaggaagagggaagaaggccaagagtcacgcttaggacatcaaaagagagaagcagaaaggtatctgcctccttctcgaagggaagggccaactttccgaagagaccgagagagggagtcatggtctggagagacacgccaggatggagagagcaaaagtaagtagtttgtcagggcacataccagactgtgatcatcacaatggagcatagatggccaatgttatgtccgggagctatctgctttccagtaccctgagagatctgtgcatgacctgatgacagaggccattgctgtctgtggaccttcctgtactgcttaaaggaatctatgcccttcaaatagtaaattgctatatgaatgcagtaaggcatgattttagatttctaagtattggtgaagaaaagtatgcagtatttatttgtttagcatttttttacagaaccagccttgctagtagcatctatagtaaaaaatgacagtcagattcttgggacttcaaaaatttatctttctctcccttgtgttgcccttctcccatttatggttgattcagctatcatgctaaagcgtatctatcgttccacaccacctgaggtgatagtggaagtgctggagccctatgtccgccttactactgccaacgtccgtatcatcaagaacagaacaggccctatggggcatacctatggctttattgacctcgactcccatgcggtgagtttcctccaccttggattggcctagagacagatggctaaagaaccttcaagaaggtttgactgggggccgggcctggtggcttacgcctgtaatcccagcactttgggaggccgaggtgggtggatcacgaggtcaggaaatcaagaccatcctggctaacacggtgaaaccctgtctctactaaaaaatacagaaaaattagctgggcgtggtggcaggcgcctgtagtcgcagctactcgggaggctgaggcaggagaatggcgtgaactccggaggcggagcttgcagtgagccgagatcgcgccactgcacttcagcctgggtgacagagcgagactctgtctcaaaaaaaaaaaaaaaaaatttgagggacttcttgatcatttgaattcttgtgtgctacctgatatcataatccctcttgctctctcctttgggtttattgttcattcaggtcaggtgacagccctcaaaagttaggatcccgtctggttttctaggttcatttttttcttgtgtcatttactgtttccaacttactcgcttgtgaagaatctgagtactgaatccttcatgattttagtgaactttctgatttattttgtccagccacagatggttttatatttgatgataaaacatttcctctttttcctcaaagtatttatagattcctgtggcttaaatttttagttgcggggcctttttctatggaagtaaggtgaagataatgaaagtcattggtatttcttagatttttcatgctcaaaagtcacaagggactttgtaaactgaatctgattgatgataattgcaacctaaaagaagaggatttgaatttctgaagtttatgccagaactgacatctattctgattcctgttccaatcagtccttcattaaaagttgcctgtttctgccagtatgctcttactgttaaaattttgacagaatataatgtagtaaatttatcctctgagaaggaaaatccacgttcacttctctttcaaaggagaatttttctgtctttgggttctggcattttctgtctctgggttcaagtgtgtctggttctataggaagctcttcgtgtggtgaagatcttacagaaccttgatccgccatttagcattgatgggaagatggtagctgtaaacctggccactggaaaacgaaggtaaggcagaagggtgaggatctcttgtgctgcccccacttgtgtttttgagaggaaactccttttcctggctggaaaaacagtaaagcatgatgttttcctaacatggactgcttcagataggtgtttattacagtttctttctgaagcctgacttgtcctgactctcgaattgttttctttcttgaataatactaggtacttttgtcctttcccttttgactgtctggtatctttgggtcccaaatggcctggcgtggtagcacatatctctattccaagctactaaagaggctgaggcgagatggggagcgggttacatgagcccaggagttctaggccatagtgtgcaatgaagatgcctgtgaataaccactgtactctaccctgggcaacacagcaagaccctatctcttaacaaaaaaatgatggtacagttttggatgtgcagacacatgtcaatacattcttgccccttgcaatcctaggaaaatgctgtcctggcttttccttcccctgaccttgtgcatatttccatagcactgggaaatctaatttctctttcctccttcactcatcttgacccaggagtggtaacttggaaatggccatgtcagagaaacaggcttaccaatatggggcatatcttgctctagcaccctccacttaatggctgttttgctccaccacttggctttgtaagagtcttactgctcattgggcaggcgtggtggctcacgcctgtaatctcagcacctggggaggccgaggcgggcagatcatgaggtcaggagattgagatcatcctggctaacacggtaaaaccccgtctctactaaaaatacaaaaaaaaaaaaattagctgggcgtggtggtgggcacctgtagtcccagctacttgggaggctgaggcaggagaatggtgtgaacccaggaggcggagcttgcagtgagctgagatcacgccaccgcactccagcctgggcgacagagcaagactccgtctcaaaaaaaaaaaaaaaaaaaaaaagagtcttactgctcattctttcaggagtgtctggaccacccaacctgcttgctgtctaggttggttcctttccctgcaaaatgaggaacagaggatttctcgataggaactgtaggattaagtactcgtcaaatgccacttggtagcagccttaagaattgttgtgttatctgttgcagaaatgattctggggaccattctgaccacatgcattactatcaggtaggctgtaacaggtggggagtgctctattaaaatcctcaggtgactataagggtgatcttgaattttctttagtgggtgactgttaaggtgaatgaccattggatagttctgtaattttaacttgcctttctgtgatagggtaaaaaatatttccgagataggaggggaggtggcagaaattcagactggtcttcagatacaaatcgacaaggacaacagtgtaagtaacctttgttttatttctgttgctcttttttgcttgacttgctactcattacttgacatctgtgtgatcacagttggcaagatacactgttgactgagggtgctcatccagagagaggcatctgtagatgcacctatttgtgttggtcaccctaattcttgggttcttgatgagtctccagtaagggcttcattggacagagactaacattggctctgatcttgttacctttagcatcatctgactgctacatatatgattctgctactggctactattatgaccccttggcaggaacttattatgaccccaatacccaggtgagtttggggcttttttttttttttttttttttttacctctgtcaatgattcttttgagaaaagcacccataatttgctacttgaggattttattccctggattctctggatgctcattgcatgaaaagtggaaaagtttagatctatggaaacagaactgttgcctatatggaaaatcagtgccttgtggcaatacaggtaagaacagtgttgctcttgaaaaagtggacagtgggtggtctgaatgtgtcctggtccctggagtgggtttttagattgatgtggactcttcttagacttgtaagtaaaaaagttgtttcttcccctaaaagggaactgtgcgccttagacctggaattgctgggaaactgaaacattctgtagacttacttgtttccaactgtatcgcagcaagaagtctatgtgccccaggatcctggattacctgaggaagaagagatcaaggaaaaaaaacccaccagtcaaggaaagtcaagtagcaagaaggaaatgtctaaaagagatggcaaggagaaaaaagacagaggagtgacgagggtaagaggaattgttaatttgctgtcttttgccacatagttattaaaatgttggaggtacgaacagaggatatctatgtttgcaagtgtaaagtaactttaaaaatactctgtcagccgggcgtggtggctaacgcctgtaatcccagcactttgggaggccaaggcgggcggatcatgaggtcaggagatcgagaccatcctggccaacatggtgaaacccctgtctctactaaaaatacaaaaattagctgcgtgtggtggtacacgcctgtagtcccagctactcaggaggctgaggcaggagaattgcttgaaccctggaggcagaggttgcagtgagccgagatcgcgccactacactccagcctggcaacagagcaagactctgtatcaaaaaaaaaaaaaaaacctctgttaatgagtatttttacctggtgtaggcaattccctcacctcttatatcccaactctctcttttacaaatgggaaaactatggatggtagaacaaagtggcccagctcaaatcccaacacctcagctccatacattttcacttttctacattccttttttagtgtttgactttatacacatttctctagttgtaattatagcaggagatactgtttagtcactttttatcctaagtattttttccatgtttctatatactctattatttttaatgcccacatggtaaaaattcacggtataactgtaccttcattttcttcatctctcctacattatttgtcttctctttctaatcttttctttttcctttttttttttttttttctgagacaaagtcttcctctgtctcccaggttggagtgcagtggcatgatcatagctcacttctacgtcaaacccatgggcttaagcagtcctcccacctcagcctcccaagtagcggggactacaggcatgagccaccatgaccagctaatttttgcttttttgtagagacaggatcttgctagattgaccaggctgatctcgaacttctggcctcaagtaagcttcctgtctcagtctcccaaagtgcttcagttacaggcaagacccaccttgctcgcctctttctaatcttatactgtcataatatataacatttagcattttgtttcttcttttaaattactccctatgacacattttcagaatcagagatgatgaacatttttacatctaatacaaaatcaaattattaggcagggtgcagtggctcacacctgtaatcccagcacgttgggaggccaagacaggtggatgcctgagtttaggagtttgacaccagcaacatggtgaaactccatctctaccaaaaatacaaaaaaaattagcctactgtggtgatgcatgcctgtagtccaagctacttgggagactgagttaagaggatcgcttgagcccaggagattgcagtgagctgtgattgcgccactgcactccagcatggacaacagagccagacttgtctcaaaaaaaaaaaaaaaagaaaatctgccgggcatggtggctcatgcctgtaatcccagcactttgagaggccaaggcaggcggattactttaggtcaggagtttgagaccgcctagccaatatggtgaaacccccatctctactaaaaagacaaaaattagctggacgtggtggcgcaagcctgtagtcccagctactcaggaggctgaggcaggagaatctcttgaacctgagaggcagaggttgcagtgagccaagatcacacctaccttgatatcagttatgcattagtgaaaatggatgaatttgcttgtgattcaattcataacacctttttttcccttttttttcttttgagacggagccgctctgtcgcccaggctggagtgcagtggcgtgatctatctcggctcactgcaacctccgccttccaggctcaagggattctcctgcctcagcctcctgagtagctgggatatcaggcgctgccacaacgcccagctaatttttgtatttttagtagagacgcggtttcaccatgttggtcaagctggtctcgaactcctgaccttgtgatccgcccacctcagcctaccaaagtgctgggattacaggcatgagccactgcgcccagcctttttttccccttctaacactgttagttgtttagagatacagaaaagaggagagagagtgtgtgtgtgtgtttaaaaacttagagtcatactgatttaatatttggactctgcttcagccacttaatctgtcaaactatattcccaatcatttgtaaaattaagatagtaaagcttacataggaggatcatagtaaagtctgaagaagacaatgtttatatatacatgcctcatctggtctgacatacagtaatcatgcaatatatactaacgttttattttattttattttattttttgagacagagtctctctctgtcacccaggctggaatggagtggcacgatctcggctcactgcaacctctgcctcccaggttccagcagttcttctacctcagcctcccaagtagctgggattacaggccaaaaccaccacacccagctaatttttgtatttttactagagacggggtttcaccatgttggccaggctggagcacagtggcacaatcttggctcactgcaagctccgcctctcgggttcattctcctgcctcagcctccctactaactgggactacaggtgcccgccaccacgcccagctaattttttgtatttttagtagagatggagtttcactgcattagccagggtggtctcgatctcctgacgttgtgatccacctgccttgacctcccagagtgctgggattataggcgtgagccaccgcacccagcccagcctttatcagttattatgagtgaatatcatgtgagagttacctctggtttgatcagtttcaggaaaatgccagtgaagggaaggcccctgcagaagacgtctttaagaagcccctgcctcctactgtgaagaaggaagagagtccccctccagtaagaccaacattgatcccctggacctagggctggggctggggatggttccgagtagaagaggaagcgcaaaggctgatgccttcctctggtgttggtcttttacctcactatgtctcccgaataaggattcccatttcttttgagtacaagcatgagataaagttttctgtctgctaatgggggtattactggagaaccagaggcagttatctggactctttctctctgccctgtgccattcttaccagacgagatgcctagccctttttatcatcttgttcttgtcagttctctaaatcaccaaggaaacccgttttctcagcctcaatctttcctgccttttggcatcacacaagaatctcttagatatggagtgcatgcgtggtcatttttttatagtttctgcctgttcagagtgaatgatgctaatattggtgcccattttttagatgccttcaagcagtagtctcaacctaatcaccagtgattctgattgaatgcaggtatataacaatagtgaccatgcattatttatttattttgagtgatcatagaccaatgattatgcatcattatttaacagttcttataaggtacccttttcctgctccgcattattaattcagctcattgtggcatctgtcttaaccatgctttgcctttaccttacatgtgagctggatctgtctacccaagtgcctattaatgcagttgcttttagtttacttcctaaatcctctttgctagagtcttaatgaaagtcatcttttcttccctccatgagttacagtaatttggaggtatttatctcttcctctttgtaatttgtaaccttttactattttctatgtttattttcctttctcttccttctcctcacattctgttgctagagtcacttctaaaggaatctttcttgtttattcttaatgaacaaggagcaaagccaagctctggccatgttgctttcatctgggaaatgagcagcatggctagtgagtttattttgaacccaattcaatgaaatgagatgcccatatcagaatatcaaaaaaaatggaccccaaaatataggttgaatttggtattgatccctggccttctccttccagcctaaagtggtaaacccactgatcggcctcttgggtgaatatggaggagacagtgactatgaggaggaagaagaggaggaacagacccctcccccacagccccgcacagcacagccccagaagcgagaggagcaaaccaagaaggagaatgaagaagacaaactcactgactggaataaactggcttgtctgctttgcagaaggcagtttcccaataaagaagttctgatcaaacaccagcagctgtcagacctgcacaaggtattaggggaaggagctatgccctttcaaactgttgactcttggccgggctttgtggctcatgcctgtaatcctagcactttgggaggccgaggcgggtggattgcctgggctcagaagtacaagaccagtctgggcaacatggtgaaaccccctttgtactaaaatacaaaaaattagccaggtgtggtgttgtgtgcctgtagtcccagccactcgggaggctgaggcaggagaattgctagaacctgggaggcagaggttgcagtgagccgagatcgtgccactgcactccagcctgggtaacagagcaagactccatctcttaaaaaacaaaacaaaacaaaactgttgactcatattattgatggggattatggggaataaaaaagattatttaggccgggcctagtggtttacacctgtaatcccagcactttgggaggccaaggcacctaggtagatcacttgagatcaggagtttgagaccagcttggccaacatggtgaaactgtctctactaaaaatacaaaaattacctggatgtggtggcgcatgcctgtaatcccaactacttgggaggttgaggcaggagaatcgcttgaacctgggaggcaaaggttgcagtgaaccgagatcacaccactgcactccagcctgggtgacagaccaagactctatctcaaaaaaaaaaaaaaaaaaaaaaaaaagccgcagcagcttatacaatccttcctcagtgtatatcagccccagttcctatcattaaaacagtccaattcaagaatgaattgctctggattaaggttatgcctaccctcaaagaacttccatgtataggccgaagccaagcattatgactgtggctagggtgccaaatatggaggatgggtaggaagagaaagggttgtggaataggacattacttgctgggtttctcatcttagctgtgtcattaacgttacagttggacctcagataagccccttttcttctttggtccttgtaacttcatctgattctatccagctctgacagtgtgcagttttcaccataggtgagtcaaattctgccatttcttcatgtagtgaatattgttatgagccacagcacaacatctatacttgggatgttaaaccgacatacattggtcttcccctgtagtattcccatttatatgaactgaccaaggatccaaattatggacaaataaagtccctaaatggactcacattctcagagcaatttgtttcacaccccttctctagtagatgttgcaagagcaggtgatggaactagattcagactttctctgaatacagagctcaaagttttatttagctaaaagctgagaagttctgcttttggtaataggtacactacttttcccagccatctctgtggaggctttgcaaagataggactctgaaaagctcctgataatccctggaacagactacctcccatgtcctttgacctgaagttgtgagttgtcagactgacacattgaaatttcacccatctgatgtaaatactaataaatggctaaagagataaaaagtaatcgtcaggaaagaggagccacaggtctggtgaattcacaaactgaactggtcataggacagtggaaagtagactgtagtacttttcctttccttaaggtcgtctgctacaaagaaccaccacttcatgtaagagctgctttggactccttaagtttcatacatatgtctgagggcttgtgtagtagagccatgcgtgaggaatttgcaactctcagagcagtctcttggaaccctggggctcctttccatgtttctctgggggctgaaagagtgactcatgtctgggaatggtatgtatggcagagtatgtgggcatttggttttcttcactggtgtgcccacatcctctgtcccatgattttcaacttagataaagagatagatatttgtttcccacatcttggagataagtaaaatgatattcctcttatgccataccacataactaatctgcatgacaagaccagttagggattgttggttgcaggatacagtgatcatttagtagatctgatcaatcaaaagagctacaatccaaaagcaactattgggaaaggcctagaagcatctctaggaccattgtttcttagacctatactcatagaattgcctctcttctcagcaaaacctggaaatccaccggaagataaaacagtctgagcaggagctagcctatctggaaaggagagaacgagaggtaaactttggtgacctattactcccttgacctcagctctttttgctttctgatatagacttcataggctgtgctgatccctccttataagaagatggagaacaaaagcagcctcaaaagatagtgcatacatttgccaaattatataatacaatcaaaataggtgctttttattatttgtaagtttatacttcaatgaagttgatatcttttttaaaaggtggtgttagggtctctaggtagataacactcctctttcctgcttagcttttaaattagttgagttaatgaacaagtgttgaatagcgctgctgaaatagcatcttttactattaaaggctaagctggaggaagtagcttagtgtcagagtcaaatggacttgctacctcaaccacacagttagggtgaattacccagtcataggcttcactggcctctctcatgatggttaagaacccacctatgggtcaggcacggtggctcacgcctataatcccagtactttgggaggctgagacgggcggatcacttgagctcacaagtttgaaaccagcctgggcgacatggcgaaatcctatctctacaaaaaatataaaaattaggtggacatggggtgtgtgcctgtagtcccagctacttgagaggctgagggaggatcgcatgagctgggaggcagaggttgcagtgagctgagtttgtgccactgcgctccagcctgggtcatagagccagaccttgtctcaaaaaaaaaaaaaaaaaaggaagccacctgtggagagccaggcacagtggcacatgcatgtaatcccagcagtttaggaggctgaggtgggagaattgcttgagcccaagagttccaggctgcagtgagctatgatcacagccctgtactccagcctgggtcacagagtaagtccctgtctcaaaaccaaacaaaagaatccacctatggaggactgttagagatagtgaattcacaaactgaactggccataggacagtggaaagtagattgtagtatttttcctttccttagagttgtctactacaaagaaccacctctccatgtaagagctgctttggactccttaagttttatattatatgcccgagggcttgtatagtggagggcttgtgtactttcccctgcttctcagaaggggaaaagacagcggaaccaagcgtgccaacttattctttccaaatgtttaagttaggaagtcactgctttctctagaagaacgtgtaaaggagtgagagattccaggagttaccaagtgagctactttcactttaaaagaaataacaaggccgggtgcggtggctcacacctgtaatcccagcactttgggaggccgaggctggtggatcatgaggtcaggagttcgagactagcctgactaacatagtgaaaccccgtctctactaaaaatagaaaaattagctgggcattgtggcactcacctgtagtcccagctacttgggaggctgaggcaggagaatcgcttgaacctgggaggcggaggttgcagtgagctgagatcacgccagtgtactccagcctgggcaacagagtgagactctgtctcaagaaaaaaataataataataacagcaatggggtagaatttccccactccccaattccctcaggtggcaatctcaggtctgctcttctgcttaccaacagggaaagtttaaaggaagaggaaatgatcgcagggaaaagctccagtcttttgactctccagaaaggaaacggattaagtactccagggaaactgacaggtaagccaggaactcttcattcagcctaggcctcaagcctaatgataaaaccacctcctccttcaactgtactgctgttttctgtctcagggagatgatattatgagtagattctgtctgaactgctaaaacatgaggtctatgccagcctttttactatctgtctttatacggggagtgtacatggaaggttggctggcagcttcgccttcccaaagccagggctggagtagccatgatcgggaaccctttctgtcttcatcagtaatactgcaccctctttacgggcctgataagaatgtcacactcttgggctttttctctagggaacctccattctcacacataggtgctaaataaatggttggctgctgatggagatgtatgatatctagcttcctatacttgttttcagtcagctagttcccaagttgtaagcccagagttatatagaatttgttgataacccactgtttacaggtgtcaagtgcaagaaatactcaggtggacaagacatagattatccttgactgaacacagaatagacaagacttaggtgatggtgcgtctcatagggcagacacagaaatcagtggggaagggaagggcatttcagggaatttcatataccagggatataagagcttatgatgtgtttgaggagttgcaaatagtttgatggtcctgaacactgcaggtatattgttgagtgacagtagataagcctggtccaaaagatgcaggccagttcatgaagtttaaacaccttgaacaccttgctaaggctttatcttaaaggcagtggacggtcatggaataattttaagcagggtattgacttagctttgcattttggagagattactaatcatgtggaagatgagtttgtagagagactaatgcattatgcaaattctatagtaattcaagtgaaagatcatgattgcctgagtgaaggtgatgagtctagaaaggagagtggcctataatcccaacacagagaggctgaggaaggaggatctcttgagcctaggagttccaggccagcctaggcaacatagggagaagggagaccctgcctctatttaaaaaaagaaaagaaaaggagtgtggcttagagagaggtgtcagatctgccagtctttgtgatcacctggggaaagggagaagtcactgatggtgttcaggtctctggtctctggatagctaggaggagaagggacagtaaagtccttgaaaaggaaaaatgggggccaggcgtggtggcttacgcctgtaatcccagcactttgggaggccgaggcgggtggatcacaaggtcaggagttcgagaccagcctggccaagatggtgaaaccccttctctactaaaaatataacaattagctgggcgctgtggcaggcgcctgtaatcccagctactcaggaggctggggcagaagaatcgctcaaacctgggaggcagaggttgcagtgagctgagatcatgccactgcactctagcctgggtgacagagcaagactctgtctcaaaaaaaaaaaaaaaaaaaaaagaaaaggaaaggaaaaatggggccaggtgtggtggctcacacctgtaatcccagcactttgggaggctgaggcaggtggatcacttaaggtcaggagttcgagaccagcctggccaacatggtgaaaccctgtctctaccaaaaatataaaaaaattagccaggcgtggtggtgggtacctgtaatcccagctactcgggagactggggcaggagaatcgcttgaacatgggaggtggaggttgcagtgagccaagattgcaccactgtactctagcctgggtaatagagcgagactccaaatcaaaaaaaaaaaagaaaagaaaagaaaaggaaaagtgggtaacaagtggatgcatgagcagaaggaaagggagataattgacagagcaaggcccttgaggaggctggacaggttttggggctctggcattccagcttatttgatccaacccacaataagagaagtatttttgtatcatggcccaataataaagtgtgtgtgtgcacaactgaaaaagttttcatctaaaatactttcttaccaggtacagtgaaccctgatatttttattcaagtctagtctctcttcatttttatgagttgttacagtgggaccatttagtgtgacattccattgggtcattctctgcaatttgaaatacagtggattaggactaggtgaaggagtcagccatcaggaggaaggacaccttggccttgagtcttctgggacaaggcttaggtggggtgcggaaagagacccttctttattctcagcaccctttataccacattctcctggctcttctcctttccagtcaccttttctgctcctcttccttttctggataaatccaggtgttctctaggactcttctctcagtgcttctttggtcttgctgctctaccctcttgacctgggctttctaaggtacccatggcctcaaccaccaccacagtctaacaagtccaaatctcctgtattattatttcagagtagcagcatcatagcatcactgtctacatggtctgatccatcctcctcctttatcccctgtgtccaattagtgaccaaatccctaattaagtcttgccccctgtcttagtctgttttatgataccataactgaataccacagactgggtaatttataatgaacagaaatttatttggctcatgcttctggaggctgggaggtccaagattgaggagctgcatctggtgagggccttcttgctgtgtcacctcatggtggaaagtaaaagaacaagagagcttaggcaaaagagggggttgggagaaagaaaccagactaatcattttatcaggagaacccactcctgcaataacagcattaatccatttgtgagggcagagctctcatgacctaatcacttcctgaagtttcacctctcaatactgttgcattggggattatgtttccaacatatgtactttgagggacacatttaaaccacagcatctcccattctattccacctccacactggactcctactcccagtctttgctcccactgttcttcagtccattctctaccctgccaccaaaatgacttttgtaaagagaaatctactcttataacttgtctttttacaaaccgtataccttgcctacagggaggcctgagctccaacttttgccagaaggatgaggttcagagacatgatttagcttaataagttcaaggttttttacagtctgaccccatgcagccttttttttttttccttttgttttgagacagtctcattctgtcgcccaggctggagtgcaatggcacgatcttggctcactgcaacctccgcctcccaggttcaagcgattctcctgcctcagcctccccagtagctgggactatgggctaatgtttgtatttttagtagagaggggtttcacctgttggtcagggtggtctcgaactcctgacctcaggtgatccacccgccttggcctcccaaagtgctgggattacaggcgtgagtcactgcacccggccaccaagcagccttacctttgtcagtttctactactactctcttggacaaattgtcttttgtgtctccttgcttgtgtcctccttttctcttacacaaactccttatttcgagatccaattcagatgtatcttcctgttgaaattcctgtcatttttggtgatgccccttcagagttttcgttccttctactgcatttcttttttttttttgaaacagagtttcactcttgttgcccaggctggagtgcaatggcgcgatatcagctaaccacaacctccacctcctgggttcaagcgattctcctgcctcagcctcccgagtagctaggattacaggcatgcgccaccacacccggctaattttgtatttttagtagagacagggtttctccatgttggtcaggctggtcacgaactcccaacctcaggtgatctgcccacctcagcctcccaaagtgattccttctactgtatttctatagcagacatctactgttgctacatccatggttgagctctcttcaatgttctataagcatctcttgacataatgtttgagacctttcttgtgaacagggccatatcttagtagtctgtgtacccagcaacaaaacatagctatcaggcactcagaggtactgttaaatatacttacttaataagaggcagatatgaatcaagaggacagagattttatattaggcttataagcaggtcttcatcaaaatgatggtgtcaggttgggcatggtggctcatgcctgtaatccagcactttgggaggccaaggcatgcggattacctgaggtcaggagtttgagagcagcctggccaacacagtgaaactctgtctctactgaaaaaaaaaaaaattaaaaattagccaggtgtggtggcgggcacctgcaatcccagctaatcgggaggctgaggcaggagaatcgcctgaacccaggaggcagaggttgcagtaagctgagttcgagccattgcactccagcctgggcaaaaagagtgaaactccgtctcaaaaaaaaaaaaaaaggaagtgatggtgtctgcttcttttgcagtgatcgtaaacttgttgataaagaagatatcgacactagcagcaaaggaggctgtgtccaacaggctactggctggaggaaagggacaggcctgggatatggccatcctggattggcttcatcagaggaggtaaaatggtttccatcttttggggggtgacatgaacctggaatgtaattaactttcactttctggcctagagtgatgtctttgccattttgctgggctttctctactgctgggataggacatgagagttgaacactttagccttgaatactgggttatagcttggcaggctgggccctttgcagtttggagttaggaagagaaggaaggagttggaatggatttcatcatacttttacatggagtaaatagtagagcagtatctgaggcagtttgagactgaagaatcatttgggcaaaagaaccagggaatcagcaatgaaaggtacagaggcatctctgagagggactgtcagcggaagtctttggtggctaaaatttaaggagcatgttgttctggttcccatgaaggactttgcccctcatatttcaagagcctctagaaaaggtgataagaggaaacattacccattttgtgttggcttgcttctcctctgaaaatgccaaccataagagattggcttatttctctcctaccgagtttctcatatctctggtattaaagcctgtatcttgcaatcatagcatcaccacccaccttaattcatcttgggtatttgtttaataatgaaagattcttttctttttttttttttgagacagagtcttgctctgtcgcccaggctggaatgcagtggtgcgatctcagctcactgcaacctcctcctcccaggttcaagcaattctcccaccccaacctcctgagtagctgggattacaggtgcataccaccatacccagctaatttttgtgtttttagtagagacagagttttgccatgttggccaggctggtctcgaactcctggcctcaagtgatccgcccacctcagcctcccaaagtgttgggattacaggcgtgagccactgtgcccggccaaaagattctttaaaaaaattatcctgccagggtccgggcgcagtggcttatgcttgtaatcccagcactttgggaggccgaggtgggtggatcacaaggtcaggagttcgagaccagcctgaccaatatgatgaaacccctgtctctactaaaaatacaaaaattagctgggtgcagtggcgcgcgcctgtaatcacagctactcaggaggctgaggcagaagaatcgcttgtaccggggaggcagaggttgcagtgagccaagatcttgatcgtgccactgcactccagcctgggtgacagagcgagactctgtctcaaaaaaaaaattattctgccaggtgtggtggctcacatctgtaatcccaacactttgggaggccaaggtgggcggatcacttgaggccaggagttcgagaccagcctggccaacatggcgaaaccctgtctctactaaaaatacaaaaattagccgggcgtggtggcaggcgcctgtagtcccagctactcagaggctgaggcacaagaattgcttgaaccggggaggcagacttgcagtgagcccagatcgcaccactgcactctagcccgggcgacagagcatgactccatctaaaaaaaaaaaaaaaattatcctatatactgcttcttactagtccagaaatgcctgtggtcaaagaccagcgctgaggctaattaatctatagggcccacttcatagtttgtctttgttttacaggctgaaggccggatgaggggccccagtgttggagcctcaggaagaaccagcaaaagacagtccaacgagacttaccgagatgctgttcgaagagtcatgtttgctcgatataaagaactcgattaagaaaggagacaagttccatgggatacaacctccctcttgttttgtttgtctctccttttcttttgttactgttcttgctgctagaacttttttaaataaactttttttcaatgtga

SEQ ID NO: 6 - DNA, 51 bp, Homo sapiens
tcttgaactgagtgacccagaatcacttgtcctttgaattttagtatagta

SEQ ID NO: 7 - DNA, 51 bp, Homo sapiens
tcttgaactgagtgacccagaatcagttgtcctttgaattttagtatagta

SEQ ID NO: 8 - DNA, 83248 bp, Homo sapiens
  misc_feature (76547)..(76547): n is g or t
tgagaggcagcattttaatataacaaacaataaggataggccagaggcttgctactcaaagtgtggttgtggctcgatagcatcagcatctcccaggacctggttagaaatgcagaatctcaggccccaccccagacctactgccttctaacaagatcccaggtgatttgtatgcacataaatgttcgcgaagcaccgggctagaacatttattaacgtaggatgttgctcttacaatgtattttgaggtcaaaataaactcatttaaagcattttttttctcattatttgctccattctctccacctctgagttgcatcaacacatgtcattgtgttctgggactctgagcctctcttatgaatcacaatggcaaaagaagtttgctgtaccattgctgtagatggccttaatgggttacaaattggattttttttttttttttttttgagacagagttttgctcgttacccaggctggagtgcaatggcacgatctcggctcactgaaacctccgcctcccgggttcaagtgagtctcctgcctcagcctcccaagtagctggaattacaggcgcctgccaccacgccccagctaatttttgtatttttggtagagacggggtttctccatgtatgtcaggctggtctcaaactcccgacctcaggtgatccacctgcctcggcctcccaaagtgctgggattacaggcgtgaaccaccgcgctcggccacaaattggattttgaaacttccatcagctgcttcttgtgcagcacctcccaggaggtaggttgtatgacaatttctgtttttagagatgatgaaattgcggcccaaggaggtttcatgactcaccacaggggcacccagcaaattggcatctgagccaaaatgagagtgcaagcttttgagtttccaatgtaaagctcatcaaactttgacattacttctttttatataaggggctttttttttttttttttgcataagagattttaagagagcagatttaagaaagattcagatgacttcacgtgagctactgaccatataaaccttgcatgtgctggccccagggaatatggaagcttcggaaggtattgctctgccctgcctgggtcccttgctcctattgcagccagaagtcccaaaaaacctcagaacagatatttgcttctaggggatatgaggggaaagcaccgggaattaccatgaggtaatggatacggctatgcaggtggcttcttgatgacaataacccatcctcaggaggaagcttttttttgtttcttccacagactcaaaatagctgagagaatctgactctgcccaaatacatgtggtgtgtgtcattggattgaatttcttttttttctttattacatagcaacttactagataataaatttcttaattaattccaatttccctggagcaaattggagccactagatgactcagaaatagtcaagactgtacatatggcattgatgccaaagtgcttcttctaccctgtcagattttaagatttctctgtcaaccccatcgaaacaaagctcccaaatggtgcttgttcagtttcaccagtctgcacggtgattcttctagggtcccctacagaatgcttgccagggggttggcttaaatcccctcccatctatagacatgcatatcaatgggacatatttgtatacacttgcttaaaaaacagaaagatagtgcactgtaaaattccatgtaaaaagtattgcttttctaatgtgctaatgtgctcctgcctgcctgcttgctacacaatgttacagagggtagagtcatgaggaattcaaggctgaagatgttttggatgtttggatgacaccgacgtacccctcaccttgcaccttgaaccctgctctgaagcccgtgtagttttcaggcttggcctaaggcaaaaactacaaagcatcctaatgagcagaattatacaacaggaatgtatgtgcatatttgacatagtttcttctctagaagggtggctctctggcctgtgacctctgccctcttcaagggcgagggaggagtccagagaagaaggcttttgttccccacggccagttcttctgcagcccctacagccccagggacctgccctgctccgcgtgggctctcagaagcccagcaatttccatatgggtgggtgacttcagagcgatggacaaagctgtgcggccagcctacaggagaaaaaggaaagaagaaataaatatcatccaatctgcctcctgcctgggggagaagggcaagttgggagtagagggtatgcctgggacacaggtgtctattaaggcttccagagacctcggtagagaagattcgaatggcatgaggatcaccagaaatgcggtcccttccacagaaacaatagtgactcctgggaaatctgtgacaacagaaataaagaagggccatctagtttttaatgctctttttttttttttttgagatggagtctcactctatcgcccagggtggagtgcagtggcgcaatcggagctcactgcaacctccgtctcctgggctcaggtgatcctccaccttcagcctcccaagtagctgggattacaggtacacaccatcatgcctggaaaatttttgtatcttttgtagagacggggtgtcaccatgttgcccaggctggtctcaaactcctgggctgaagtggtccgcccaccttggcctcccaaactgctgggattataggtgtgagctactgagcccagccccacttttttctactttaaattggaaaacaggaaataaaataactcttgctgttccattacatgtatctaagtgaaagttcgcattttggtgtgttttcctccaatcttttctcctgtgcaaatttgttgttggttctttttttttttttaattttttaaacctgtctcactatgttgcccaggctggtcttgaactcctgggctcaagtggcccacccacattggctttccaaagttttgggattacagacatgaatttgcaatcctgtcctgtcctgcacctgtcctgttgttggtttttaaataaaggaattatattgtataccaactttgaatttgcttttattcttaatttaccatgatatgctataagatgtttctctattcttacatagccattataatgcatgatttttctttttggctgtgtaatattccataatttactaatttttgctaattatggaaatattccataacttcctttcagtggaaatgtatgttgtttctaagtctctgccatcataatcttagtgcaaaaagcattttcccattttaaattatttcctaaggactggttcttttattattattattattatactttaagttctagggtacctgtgcacaacatgcaggtttgttacacatgtatatatgtgccatgttggtgtgctgcacccattaactcgtcatttacagtaggtatatcccctaatgctatccctcctcactccccccaccccacgacaggccctggtgtgtgatgttccctgccctgtgtccaggtgttctcattgttcaattcccacctatgagtgagaacatgtggtgtttggttttctttccttgcgatggtttgctcagaatgatggtttccagcttcatccatgtccctacaaaggacatgaactcatcctttttcatggctgcatagtattccatggtgtatatatgccacatattcttaatccagtctatcattgttggacatttgggttggttccaagtctttgctattgtgaatagtgccacaataaacatacatgtgcatgtgtctttatagcagcatgatttatagtcctttgggtatatacccagtaatgggatgggtgggtcaaatggtatttctagttctagatccctgaggaatcaccgcactgtcttccacaatggttgaactagcttacagtcccaccaacagtgtaaaagtgttcttatttctccacatcctctccagcacctgttgtttcctgactttttaatgatctccattctaactggtgtaagatggtatctcattgtggttttgatttgcatttctctgatggccagtgatgatgagcattttttcatgtgtcttttggctgcataaatgtcttcttttgagaagtgtctgttcatatcctttgcccactttacaagaaaaaggactcactcttagaagtgggctcagaggctgggtgcagtggctcatgcctgtaatcccagcactttgggaggccaaggccggtggatcacctgaggttgggagttcaagaccagcctgcccaacatggagaaaccccatctctactaaaaatacaaaattagcctggcgtggtggcacatgtctgtaaccccagctacttgggaggctgaggcatgggaatcgcttgaaactgggaggcagaggttgcggtgagacaagattgcgccattgcactccagcctgggcaacaggagtgaaactccatctcaaaaaataaattaattaattaaattaaataaaaagaagtgggctcacagcattaagggacatgcacattttcacctcctgatctgtgatgtcacagcactctttacattgacacggtgatgcaggaagctggcagtcccactgtctaaagaagctgcacccagagggctctcatcaggcaccaccggcctgactgagcagctgcagtctcttatgaatgagctcaatcccatgtacagaattctgaactctaaacagctccaaaaaccacactctttagataacttattgggagctgaaacctgacctgaggctgttggcctactgtgaatattttgacattttgctgctgtaaagggtttgatgggtagaggacacccaagaccccactagattgttctttattgcatatgcacagatttacttcctaaaatatggacaattctttcacagaagcaggcaggaagtgtaggaagtgtaacacccagctgaacactcttcaggctttttcccatgcacggggatagaatccagcggccatcagggctcccacgcatgcaaataactataaagcacggcaaagcactaaacgagtcagaagacaggaacagagtgagctcaggggagaggatgggcactgtgtgccagggcggggtagaagatggctcggggggaggcagaggaaggaagtggcatttcagtgggacccccgaagatggcacatgggcttctcaaaacatacaaactctttccccgaaaagccctcatgactccctggacttttcttttaccactcgttctatgctcgtatttgtgaggttatttgataaatttcagtctccacgaggtcaagaacttgatctggcctgttcactgctgcatgttggcacctggcccagggcctggcatttggtcggccctcaacaaacattgttgaaagagagaatgctgcacaagaacctaacggtattcattcaagctgatggaatctaaatcctagtgaatgggttcttacattggaaagtactggaacaaaacaaagattttaagcagggagtcctgtaaaagcctcctaaaggaggagcctgggtttatgtaggcccgaattcctgctcctgaacttcatctgctgtgccttgtcaatcctaagcctctatgtaaacacagagtatgtactgacagtgtttacggagaagagccacagggccagtcccaggggaggtgcaccttttaacagggtccatctggaggacagcctgcagctgtggactcctcgactgcagacatggagagcagaggaccccattcagctcaggaggtgtggccagagagaccacttggcgagggttagtgttcctcagatgcctctgccagaactctgggaacaagcccatgccatgcagctcccatgggagccaggtatggtgagcctctgctcgacaacactccagagctgctctaggagaccccgactgaagagatggggaactagccaggtatggtgcaaaatttgcgtgtaacttcagggattcaagaatctgcacttggccaggtgcactggctcatgcttgtaatcccaacactttgggaggctgaggcgggaggatcacttgagcccaggaggtcaaggttgcaataagccatgatcgtgccactgcactccagcctgggcaacagggtgagaccatacctcaaaaaaaaaaaaaaaaaaaaaaaaaaaaaaggaaagaaaaagagaagggtgcaggcagctggcacaactgtgtgtgtatccatgtgttggagaggggtgtctttgaattcatcactagtccactatgcatcacccaaagatgagcaaggcataacctctgccttcaagaagttttcaatctgatgggtgctttaaagaagctgccaaaatgaagggtgggctctgggacccagaagaggctgggtggcagatttcctcaaattgtctttaaatctagggaaagggcctggccagctgttctgggaattctgcatttataccgaactttaaatgttgatgaaataaaccaatttcaggacatgaattctctcccagttttccaaagacattcccaaatgagctctgctgctaacatctaagcctccataggaaagatgaatacggaaatgatatggtgggtatgataagggccagactttccctctaaatgtgaagcaccaggtacaagccttggtgcttggtagagccttgtcaaaagctcccttttcccactgaaatgtctcaccctgtggatggagacactgtgctccccaaagtcacccttgggaatctgcatgtgaatcaaccctgacccaggtgggcagcatgtgacccatccatgagtggggtctggaacccatcttacctgtgggcccattacctgcactacctgggcaccactgtgccggctgggctttccctaacttactccagtttctgccatgatagatttcctcctccatttcctgattggcactccagtccctcccttccaggcttacagcctacccgaactccagcctgcctggtcctcagcctggcctggctctccctgatccagcacttccccgggattagctacctaaacccacctggatttcagtgtttgcctaaaccaggcattctcaattgcagcactattgatattttggaccagataatttttttttttttttgagacagagttttgttctttcacccaggttggagtgcagtggcgcaatctcagctcactgcaacctccacctcccaggttcaagcaattctcctgtctcagcctcctgagtagctgggattgcagatgcgtgccaccatgcctggctaatttttgtgtttttagtagagacagggtttcaaaatgttggccaggctggtcttgaactcctgacctcaagtgatccacccgcctcggcctcccaaagtgctgggattacaggtgtgagccactgggcctggatggataattgttaattctttgctgttcctgtgcgttgtaggatgtttagctgtatccctggcctctacccactagatgtcaggagcatttgctcacccacttgtgactaaaaatgtccccagacattgccaaatctcccccagagagtaaaatcacccctagctgagaaccactagactgaaccaagtctgtcagtggcttctcccttcaggggtcagtcgccctactctgattggttcccctaattcaagacctttgttctccctgctccctccagacactgtctgtaaatgccatgttccctgctggttgatgtggtggttttttttttgttttagctatcactgttcatctattcataattaaaatagttaccatcccctgtgtgctcctagatgtcagattcagcctttataaacattacagtatttagatagagtctactgctgtccccattttacagatgagcatctagaggcccagaatacttaggtcacctacccaaaggaacctacccaaagtcactgaacctagattcaaactcatgagtgtttattttttattttttttttttttgagacagggtctcactctgtcacccagacaggtgtttcctggtatgatcacggctcactgtagcttcatcttcccgggctcaggcaatcttcctgcctcagcctcccaagtagctgggactacaggtgcaagccaccacactcagctaatctttttctattttctgtagagagggggtgatatggtttggctgtgtccccacccaaatctcatcttgaattcccatgtgttgggggagggacctgtgggaagtaattgaatcatgggggcaggtctttcctgtgccattctcatgatagtgagtaagtctcatgagatctgatggttattataagggggagttttcctgcaaaagctctctctttgcttgctgctatccatgtaagatgtgatttgctcctccttgccttccgccatgattgagactttcccagccgtgtggaactgtaagtccaattaaacctctttcttttgtaaattgcccagtctcgggtatgtctttatcagcagtgtgaaaacagactaatacagggggtctcactttgttgccaagactggtctcaaactcctgggctcaagcaatcgtcctgacttggcctcccaaagtgttgggattacaggcagaagccactgcacctggcctcatgagcgtttaaagtccatgcttctaacaatcatgcttgagttgtctgaaatgcaacagatcccacaactcttccaccatcagaaaacagccacttagctctctcgtacctgtgacagacctccagagatacccaggagagctctcagatccactgcctgattatcctagctaaccagggacttccaaagctcatgcctgcctgcctgtcccacgggcctcccatctcaggcctcttcgggcatcagcagtggctactccttagagggccaggggcctttgatgtacaaacctgttccagattaagggctgcctccttctcccccaggacaacccagcagggagctcattaacacagatcctttgtttgaccacataatgtttggaaaaggaggctctggtttccagtagcccacccctgttcccatatgaatgtcaagaaggtcagtgccctctaatgatcttagaaatggctttggggtgaagctaagattcacaggacctagagtcactggatgagtgcctgctgtctgggtgtgactgagggactcagcagcttaaattgctgatgagtcaatctttgggtagtttaaatgtggcccagtaagaggtgctgtccctgggcagggagatgactctcttcccctctccaggtttttgttccctttgaattgtggctgttaagaaagcataaagtcatctgcttaaatcattaaattacagtgccaatattaaggagtcagacctgggcttgaatctctgctctgcgaatcagtagcttgaaaatcttaggacagttacataacatctccaggcctgttttctcataagtaaaaagtggggtcgatatctatctcactggattactgagaggattagaggtaatgcatgggaaaggtttagttcccaggagcactctagaaatattattatatctactgtaattatcaggaacaaggtcacttactgttgacttacctccaaagtttaggggttcactcattcatttgttgattgtttcaatgatatgtggcgggcactctactaggtgtgggagccagagacatggatgcttcaatgtgacaacagtgatgatgatggaacgttaagggtatgggcccaggagtttaatggagccgggttccactagctgagtaatcttgggtatgtaacctaaccatttgatgcctccgtctccttgagcaaagtggggcagcaggaagacggtcaatctcacaagattgttgtggggtttaaatgagatggtccatggcaaatgcttagtacagtacctgacacagagtaagccctccatgtgtgttggttactattgttactgattagttactattgtcatcatcatcattgccgtcaccttacgaggaagtttatttaagaagcctgtgactgacagtgcaacttcaagtaggctggctcgatggaatgggctgcttcagaaagtgggtcagtgtccgagaggcactttcagttaagtgactacagagatgactctgtaaggttgattccttctgaaggcttttgagtccctgctggacagcagagcttccccatctaagctactgcctcaaagcccacatgctgttattgccatgaccagatgagactcagggccaagccaggcctgggaatattcacccaggatggtgttgtgaaaggtcagggttgtgggtttcacggctctaagactccaaacatttaccatgaatcatctcatttatttatttattcaaatttgttagagacagggtctcactctgtcacccaggctggagtgcagtggcctgaccatggctcactgcaacctcaaccttctgggctcaagcaatcctcctgcctcagcctgctgagtagctgggattacaggcgtgcaccaccatacctggttaattttttttttttttgagacagagtttcatgttgttgcctaggctggagtgcaatagtgcgatctcagctcactgcaacctctgcctcccacgttcaagcggttctcctgcctcagcctcctgagtagctggaattacaggctcccaccaccaggtccagctaatttttgtatttttagtagagatggggtttcatcatgttggccaggccggtctcaaactcctgacctcaggtgatcgacctgcctcagcctcccaaagtgctgggattacaggtgtgagccattgcaccaggctatttttttttttaagagacagggtctcactgtgttgcccaggctggtcttgaactcttggcctcaagcaatcctcctgccttggcctctgaaagtgttgggattacagacgtgagccactgtgctgagcctcttatttaaatcccacaacagccttaggaagctgattttgttgcattgccataggattccttgaattctgctggccggcaaggcactctgaggaggggaagttaaacagctacttttttttttttttttaagagatgggggtctccctatgttgcctaggctggtctcgaactcctgggctcaagtgatcctcccgcctcagcctcccaaagtgctggggttacaggtatgagccaccctgcccagcaacagctacttgttaattgcctgtaagtctcaccttgtcagtcaggctgctgtcgcaggctgggtgtgccaggagcagccgcaccaggtccacgttgccatggtgacaggccaccatgagggccgaggatccatcgtggtcctgcagattgacatctgcctggcagctaagcagcgcttgaaccatgtcctccctgtcgtggctgactcccagcatcagcgcagtctggcctccctgcatgcagagccacagggatgtggtgaggttgctgccagtggggaaggaccccctctccagcctgggtgtgctcatcagagacttctcaataccacaaccactgatttgaatctcctgcccttgatatgggacataaccttctctgcttggcaaaattctactcttttaagactagtcaaatgctacatcctctctaaagccttctctcactccccaggcacgggaatcctaacacagcactcaccacttagtattgcaacttgtcaacttctctttctcacggattgtgacattgttgacggcagggactaagtgtttttgtccctgtctccccagtgtctagcaccaagaacgtgctgataaatgtcgaatgacggaacagatgaaggttgaatgcttgagcatcatggcttcttactgcctgccccagcctgactttccccaggaagccttctctgctcaatgcctctgaaattttcagtttaaggatacccagaaccctcttctctcaacacgatctctggttgcatgtcctgtggtcatttctaatctatagacattgacagtaatcttgggcatctctgtaatcataggtggacgtagcaatgagccggaatcagaaagcaagctctagttctactgtttcctaatgcatgattcaggccacatcactgtcttccttgattcttggtttttcttttcttttttttgaagatggggtcttgctgtgttacccaggctggagtgcagtggcacaatcacagctcactgcagcatcagtcttctgggatcaagtgattctcccaccttagcctcccaagtagctgagctcatgggcacgtgccactcaatatacctggttagtttttttgtttttttttttttgtgagacaaagtctcactcttgtcgccgaggctggagtgcaatggcacgatctcagttcactgcaacctccgcctccaggttcaagtcattctcctgcctcagccgcccaagtagctgggattacaggcagctgccaccatgcccagctaatttttgtgtttttattagagacaggctttccccatgttgaccaggctggtcttgaactcctgacctcaggtgatccgcctgccttggcctcccaatgtgctgggattacaggtgtgagccactgtgcccagcttgttttccttctcttaaaaattaatgtaacaattggggccgggtgcagtggctcacgcctgtaatccctgcactttgggaggccaaggcgggcagatcacctgaggtcaggagttcaagaccagcctggccaacatggtgaaactctgtctctactaaaaaaaaaaaaaaaatacaaaaattagctaggtatggtggcgggcgcctgctattcgggaggctgaggcaggagaatcacttgaacccgggaggcagaggttgcagtgagctgagattgcactactgcactccagcctggtcaacagagcaaaatctgtctcaaaaaaaaaaaattaatataacaatgatttgtcctgtgtacctcgcagggcttttgtgggaatcaagtgagataaagtatgtaaatataatgatgtacagtaataatttttctgattacaaattgaccatcatttcccatagattttcttaattttgttatatacactatatgtgtgcatgtttgtgtgtgtgcgtgtgtgtatatatatatatacatgtattttttttttttgagacagaatctcgctctattacccaggctggagtgcagtggcatgatcgcgactcactgcaacctctgcctcctgggctcaagtgatcctcctacctcagtctcctgagtagctgtgaccataggcatgtgccactacatctggccaatttttttttttttttgagatggagtcttgctctgttgcccaggctggagtgcaatggtgcaatctcggctcactgcaacctctgcctcacgggttcaagccattctcctgcctcagcctcccgagtagctgggattacgggcgcccaccattacgccaggctaatttttgtatgtttagtagagacggggtttcaccatgttggtcaggctggtcttgaactcctgacctcaggtgatctgcctacctcggcctcccaaagtgctgggattacaggcatgagccaccgcacccagcacatctggtcaatttttgtattttttgtagtgatggggttttgcgatgttgcccaggctgatcctgagcagtccacccaccttggcctctcaaagtgctgagattacaggcatgagccaccgtgcctgactgtgtgtatatttcttttcttttcttttttttgagatggagtctcgctctgtcacccaggctggagtgcagtggcgtgatcttggctcactgcaatctccgcctcctgggttcaagcgattctcctgcccctcagcctcccaagtagctgggaatacaggcgtgcatcaccacacccggctattttttgtatttttagtagagatagggtttcaccatgttggccaggctggcctcaaactcccgacctcaagtgatcagcccgcctcggcctcccaaagtgctgggatcataggcgtgagccaccgtgcccagcccccagctgttattaaagccagatgacatatgcagatggtcctcacatctgcccctctgcctgatgcagggccccttccttcctcattgtcctcccggtccctttcaatataatttaattcaatgagcatttatagagagctactatatgctgctgcattgccctggagatccagagagaagcagctttttcctaggaatacactcccagtgtattcccatttaacctggtacctctgctctcttcacatgtgaaggcccagggggagctaaagggaatggctgcagctatgcattctcacccctcctttggtgacccggaatgagtcccttgccctcctacagcatcagtttcttctctgtacaaagaaggggttgattttgatcctcttgcaagcaacccctcttacaagagggacaatttagaaaataattaacgtatttatgggaaacattagttaaaatgaaacattagctgtattgagtcttaagggacaggagttgtaggtgactagaataccttgaaaaccagaaagtaatctataaacatcggcttctggccgtcactagggttgctatcagatgaagtatgcaacggtgactttgccatcgggttaggttactatctgcaatctctctgggggagtgtaggacagtggtgcttaatatattgttaggagtccattttccataagtctcttgcttttttgcacatcttgtgagtaaagcacaccacaatctgcccttttgctctagactatctttttaaggctgtttatatagtgaacagccttggaagctggagatattgtcttctttggagaaaagggcaggcaggcttactgtcccttatcaaagcttcaggttccctacactcaggtgtcctgtcctgcaacgcagcccactccatgcttagctttgtggccctcctcacactgccctgtgggagctgggatttgggcaatgctgatactgtggctactgcttcggctgtgggtaatacacagtcctttgtctcgggcacagaagtctcatgtcttctgccagcatccacaaaactgtagcaggctaccttgttagctttaacgtggggtaaaagcccagactcttcacagttctcaacagttaccttatcatctatgatcactccaggggaaaggagagttaaacatactccattcattcctgtaggttcaaaaaatgggcaaatgaccttttgaggagtccccgttgttccatgtggagccttgtctaactcaaagcccttctgggtaaggaccacacccccaccctgtgttctcaagcagagggccccagaagatgaatagagacattccaaccctctgtgctgcctttgctgtcttaagatcctttttggagtgaaccccaatcaacttgtacttaatcactgcaggaaagattcagaggccgggcgcggtggctcacgcctgtaatctcagcactttgaaagcccgaggcgggtggatcacctgaggtcaggagttcaacaccagtctggccaacatagtgaaaccccatctctaaaaaatacaaaaattagctgggcatgatggcgggtgcctgtagtcccagctacttgggaggctgaggcggaagaatcgcttgaacccaggaggtggaggttgcggtgagccgagatcaagccattgcactccagtctgggtgacagagtgagactccgtttcaaaaaaaaaaaaaaaagattcagagtacccagtcttggctcagtttaaaaagttatcagaggtgtctagagtaacaaatgggctactttggtagtgcatgagtttcctgacactggaggtcctggagctggagaccaagcaaagaagcaggagaccacctggtaggattttgcaaaataataaggggtagacctaggtgacatttaagggctcttctgacctaaggcacaagtgacccagtgaattagtggagcccacgtgtcctgaatctctggctattacatttgtgtagggccctactgggtcttcgcagcaactgctgctcccagcctggcccatagcactgctcctggggactggggcatgatttgtgtgtctggaataataccactcacaattgttggtgcagaggtaaggcagataggagtgttttgggatctggttatttcaagggctgaggcagcatgccaggttgattgataatgacctgcagaactctataataagcctctgagctaagctgaggcctggaaagtgggaatcctcacacccctaggaatgatcagccagtgcttctgtctgccctggctatccacactttccctcagtctgaggactcatgaccttgttaaaaggctttggggtgacagaggtgagaacttctttaaaggactggacctccaaagagcctagttaggtgcctgtgggccaagatcaaggtgggtcacctgtgagggctttcttagagcagccaactagcaaatgccttctcaagatggcaactgggaatgttggttctagaggttgcatccagatggaatttgctcagtttcagactgggacttatattagaagctcactgacctctgtgcaagctgtgcaagctcctggctgggtctcgggagcctataaggaaaactgaatattcaggctttgcctgatgccatttggaggtcccagcctccttgggttaaaaactacatggatctgcatggaatttctcaccccactagcagaataaagcgggaggtgcccctgcatttactgaagaggagatcctgttcattccacccacctgagtagcttgaatgttcacatttccttctcttaagagcttccagacaacagccatgtcttcattggtctctgcggaagccaagggagtgatcattacggcagtgtagccagctttgttctgatggtccacattgcagacgcctgcaagagaagcaatgggtgctgcaaaggctcctgaggggccaggagccagactccactttagccgtttcaatgggacactgctcgctggttagaaagccatggactagagcaatgctttccacagctggagccagtggtttacatttgtagcagcctttaaagatggtttcttttcttttcttttttttctttctttcttttttttttttttttttgagacagagtcttgctctgtcacccaggctggagtgcagtgactcaatcccgtctcactgcaacctccacctcccaggttcaagcaattctgctgcctcagcctcctgagtagccaggattacaggcgtgcgccaccacacctggctaatttttttttgtatttttagtagagacggggtttcaccatgttggtcaggctggtcccgaactcctgacttcgtgatccaccctccttggcttcgcaaagtgctgagattacaggcatgagccaccgcgcccagccagctggttacttttcttgacaagttttctgaggatacccagcaagggaggcccacaacaaagccagagatggccaaagggccagtggccttgacttcatctcctaaactggagcacaagatgttattcccattttacagatgaggacactgagggccagagaagttacattgtccactcatgtgaaggtgaagtgggtcaggaacactcaggtctgtccggctctggtgctcatccctcacctgcccatatgcctggaatgccacccacggctgtgcattttgggtttcacactcactagctcacgtttgtgtgtaacaaactaatggctgtgtttgtaggtcctttccaagggcctaggggtctactgtgccaagtaccaggagggtgaacaacaccatgggataaacgtgggaaatcttctaagaacaaccatctcacttgaaaaatggagggaaaaaaaactccacaatttttatattaaaacaattaagaattacatttcacaatacaatggaaacctagcattatttgtttatttgtttatttttcttgagacaaggtctcactctgtcacccaggctggagtgcagtggtgcaatctcagctcactgcaacttctgcctcccgggttcaagtgatcctcctgcctcagcctctcgagtagcctgtaggtgcccgccaccatgcctggctaatttttgtatttttagtagagacagagtttcactgtattggccagtctggtctcgaactcctgatctcaaatgatccacctgcctcggcctccgaaagtgctgggattacaggtgtgagccactgtacccagccaaaaacctggcatttttttttttgttttttttttcagacagtctctctgtcgcccaggctggagtacagttgcatgatctcggctcactgcaacctccgcctcctgggttcaagtgattctcctgcctcagcctcctgagtagctaggactacaggcgtgcatcaccacgctcagctgattttttatttttttttaatgtatttttagtagagatgggatttcaccatgttggtcaggctggtctcgaactcctgacctcaagcaatctgcccacctcggcctcccaaagtgttgggattattacaggcatgagccactgtgcctgattaaacctggtattttttttttttttttttttttttgagacggagtctcgctctgtcaccaggctggagtgcagtggcgcgatcttggttcactgcaacctccatctcctgggttcaagtgattctcctgcctcagcctcctgagtagctgggattacaggtgcacgccaccatgcccggctaatttttgtattttttagtagagaccgggtttcaccatgttggtcaggctggtctcaaactcctgacctcatgatccacccacctcagcctcccaaagtgctgggattacaggcatgagccacggtgcctagccaaacctgacatatttttaagactaagtagtaaatgagaactttaaagaaagttctgctttgtagccctggggatatgtatccatattcctccccacctaaggagaggtaggggatcatcaggcatagaccgataactgttaagtaaatgaccccacctctcaagggtgatgggaaaatcaaacgtctttgtactgttacttatctgaaaaaattatgttgctctttttatttgtttgtttttttgatagggtcttgctctgttgcccaggctggtgtgcagtggtgagatcatggcttactgcagcctaaacctcctgggttcaagcaatccttccttatgtagctcctttgggcaacagaaaaacaattacacttaatcaagtcacttagcctttcttagcatttccttctctataaaatggggataacaacacaacctaccttataggtgaaatttattgagtttatttatttatttatttattgagacagggtttggctctgttgcccaggctgagggtgagtgcagtggcactcactataagctctgcctcctgggctcaagtgatcctcccacctcagcctcctgagtagctgggactacaggtgcatgtcaccatgctcagctaattctttgtgttttttatagaaacagggtttcactatgttgcccagactggtctcgaactcttgagctcaagccatccatccactttggcctcccaaaatgctaagattacaggcccgagtcactatgcccagcctaatatatttaaagcacttagaacaagcttgtccaacccatgggccatggggccacttatggcccaggacagctttgaatgtggcccaacacaaattcataaagtttcttaaagcattatttttagctcatcggctatcattagtgttagtgtattttatgtgtggcccaagacaattcttcttcttccaatgtggcccagggaagccaaagattggatacccctgacttagaatcatgcctagtacacagtaaacactcggtaagagttcactgttattactattattgtccagaatgatattctcataaggtttaggtattcattgtaaaaatatggtttatgaaaaaaatgtcaattagtgctatttgcaagttctgtgcaagtggaaaaaagcaacatttgtttgatattccctccaccccacaattttcctttctttttttttttttctagatggagtttcactcttgttgcccaggctggagtgcaatgctgctatctcagctcactgcgatctccgcctcccaggtttaagcaattttcctgcctcagcctgaatagctgggattacaggcatgagccatcacgccccactaatttttgtagttttagcagagatggggtttctccatgttggtcaggttggtctcgaactcccgacctcaggtgatccgcgcacctcggcctcccaaagtgctgggattacaggcatgagccgtcgcgcctggctaccccataatttttcaaacaatttttcagaagtgtgccatgaaaataccaggccgtcagtggagacagaggcatcagtctgtctcatttatcagcagttttccctcaagctccttggaccactgccatgagccggcaggtgatggaagctaaataacaactccatacatcacctcatagctctgtcctgatacggaagtgaacgtttgcactaccttattaataactttatttctacaccttgattattttctgtttgcttttaagatgtgtaaaggagcctcagcttatcagttctcttttatctctttagaaacatgatttttagctcagtagaatgaggtctgacacctgctcaggggctcaggaaagggactaggaggggctaaggacccaggattttatttatttacttattatttttgagatggagtctcactctattgcccaggttggagtgcagtggtgtgatctcggctcactgtaacctccgcctcctgggttcaagcgattctcctgcctcagcctcccaagtagctgggattacaggcatgcgccaccacgcccggctcatttttgtatttttagtagagatggggtttcgccatgttggccaggatggtcttgaactcctaacctcaggtgatccacctgccttggcttctcaaagtgctaggattacaggtgtgagccactgcatcctgccaggacccaggactttatagaagatacttcagagcagccatcaggcagcaaagccaactctccctggaggtgacagaggagcaaggctctcgacagagcatcctctgactcaataagccctgcaagggcatttggcaaaataaaggacggatcacttggggttgagccggcagaggtgcactctggctctattctcaataatgagtcacttctgtacacccctttacagtttgtaatttttttttctggatgcttaacaactgcttctaaggacaccccaggtttgagagtgtgacagatctgtcatcctcaatatcccttctacagaagagagaaagtaacgactctctcaacccattctccccaacccccttcttactttacctttatgctatttagctatttcactatgttaaagggaaaagttcccaaaccactttaaagtcgatgagtattaagtgaattcttagcatcagcagatatttataccacccaaattttagttgtctcttctctgtcctggcctggcccacccagaaacttctaacaggctacaagactgtgagctacctaaagacaagggccatatgttaccagtctttggattcttcatgcacataatggatgttcccaaagtctcagtgtcccagaagcatagatagggtagtagaaaaagcccagattaagagactgatcgatcttggtttgaattctggattagcttcttacaggctctgtgaccttcactgcattacctgacatctctgagcctcagtttcctcactggaaaaggcaattaagatctgcttcacaattcctgcatggattgtacatgacagtgtatatgtatatcacactaagcccagtgtctgggatgaggatgacattgaaaaagcagtagctgctttattcacattctacactgatggcttctaacgttgaatacagtaacagaacacagagccatgctccatttaattatgtgcctttctcaattgatctaccatttcgatggtatccatgcatccatgaagaactgaaatcaataacatcagctcactgttagctataatttaatcttcttttgatgatgtgaaaatcagaaacaacttcaggctgtcattatgtacgttgcctttcccgttcagctgaagagactcaaagctgcttagcagaattttgaagacttggaagtttactggaatttaacctagctcccgagagtcatccatcgctcattcatttaacagacgttttcactcaacacctactaggaaccaggaactggtctaggtgttagggaaacagataagacagacaggagccccttttgagtgaattaacattctgttgggtagaaatgaaaagcaaagagtgtctcaagaaagaaagagggttctcccctagagagaggtaggggcagccactttagacagaggcaccaggaagacttttgaggaggtgacattggggctgtgacttgaatgacgagaaggagccagtcacaagaagagcctcagggggaagagtccaggtagaaggcaaatacaaaaatcccaggagggaatgaccttggtgagtgaggccagcgtggctggagtggagggaaggaggagagcgtggtggcagcagagacggcccaggcaggtgggagccagggcaggtggggtcctgaaggccaggctgaagaagccgcctctcatgctaagagcaataggaggccacaggagggatttcagccagacaggacccaagttagggaaagccgttggatcctaaattcagacttttgatgttcattgaaattcccacctgaggcctcctaaaagaagagttatgctctacctcctagatggcagaaatgaaaagaggaatgggaccgacttttctttctttctttttttttttgagtccaggtctcgctctgtcactcacactgcagtgcagtggtgtgatcacggctcactgcagcctcaacttcctgggttcaagagatcctcccacctcagcctcctgagtagctgggaccacaggcgtgtgccatcacgcctggctaatcttcgtatttttggtagagatggggtttcaccatgttgctcagactggtcttgaacctctgagcctaagcggttcacccgcctcagcctcccaaagtgccaggattataggcgtgagccaccgcgcctggaccagtattgactttaaaccctggtagcacacttagttattgggtgatctagggcaagtttgctgacttttctgaatgtcactttcatggtctgtaaagtgggataatcatcctattctaataataaatttttattattaaatgaaataattatattcattattatataaattataattataaagacaatataatttataattaatataatttataaatataatttatcataaatttaaattatatttagcaggtgctaaatacttagcagaaggccacatctgtggggatcatttggggttttaaacctcttgtatgtaccctgctagacagccccatacagctttcctaaactcatagatgacatttgaccgaggcccatgcactttcgctcagcctcatcatgcacctgtctttgattgactgttaactacccctttccagtctgtaaccctgattctactctcactttcctgaggagatcgaggccatctgaggccagtggcctccacctccctgctctcctcaacatctctctgcactgttacccactttctcctttttttgcttccatctcagagaaatgaatagcccagcgtcttgcttcggctgccctcacctgcctccgctgtggagtccaggctttcccggctcctcccagaccttgctttgccaagtggcttctctcttttgtatctttcaccttcctccttctctctctctgattctctgtcagtctctatctcttcctttttctctccctctctctctttttctgcctgtctgtctctcattctctccctctccatctctctctttgtctgtctctctgtctctcattccctgtctctgtcccccaccttatctgttcctcttctttcttggattcttcttctcagtcaaaaaatatgttcagagctcctctccccaaacaaacacacaaaaccaactctccgaaggctctcccacctccttcagccaagacaccccatcgctgccttccccaagcctgtcgctttgctccttccactctgctagctggtttcctcccaacatgcccctaaagcagctgtctccaaagtcaccagtggcactctccgtcccctccatctgccaaacccaggcatcatccttcagggaccctgcagaatctgacacagttgacaatctttgtttttcatgggctgttcttccccatcagccacaatcctcttatttcttctagttatcacacgactgcctgggtctcctccactgacgtgctctctctctctctgcacaggataaccaagagcaaaagaggactcctctcctaaaggcctcattgcatgtgctctggctggccccacccaaagctctgttgccctttcattttgcatctggaattctcaatagcctttgcacatttccgcagagatgatccactggaaactaaaaatctgccccaaactgaattatcctttctgcttcctccacatttggtccttctcctcttgcagcccactgccttctcaaccatccaggcttgacagagagctccaactcacctcaccagtccggcactaccctcccaatggcttttttttttttttttttttttgagacagggtctctctctgttgcccaggctggagtgcaatggcactatctcagctcactgaaacccccacccaccccatgctcaagttattctcctgcttcagcctcctgagtagctaggattacaggcatgcgtcactaccacccagctaatttttgtatttttaatagagagagggtttccccatgttggccaggctggtcttgaacttctgacctcaaatgatccacccgcttcggcctcccaaagtgctgggattacaggcgtgagccaccatgcctgacctcccaatggctttttgctgtttggttcctaccatcctcacctattacaagccctcactacctctctgtggacctctgcaatggcctcctgtctgccctgccacctcctctcctgctcccttcactaacccacccctactgtcaaatgactcttttagagaattaccctggttatggagtttcctacaaaaaaatctgcactgacttcctgggaccttccaagcagggttcagcctggcactccaggtcttccatttctctatgtggtggctccaactcacccttccaaccttaattcccatcccatccaaactagaagctttctagtctccaggcatttttccctgtctaacctccatggagttccttctgcctggaagactgtctgcctgctggagccctacctgctccagtgcacctttgccgctccctgaactagacacgctctcatttcagttcctaaattgcattctctatctctctttcatgagccaccatccagctccatcccaattgctaggctgtgagctcccaagaagcagagggctcacctagctcacctttgcatccctggtagtagccagtatggacctcatgtgtagtcaataaatatctaatgaaagatgaatgaatcaagttgagtcaaattggtcaaatggagccatgacctttgttaaaaagtatcttctgaagatgggaaaatgccattttccctagaggcagtacggtatatagctctggaggtggacagagtacaaaacctgactctacccttgaccagcgctgtaacttgagcaagttttataactcttgagcctcagtttccttagctgcaacatgagaacaatacccacatcacaggaatgctgtgaagaacaaatgaggcaaacacaggcaaagtggtctagtccagttcctggaacacagagggaactttcaacagtgaagcatttccttgacagaaagaaatgtggtataagaattgcccttcaagtcattccatcaaaaagacacctgcatttatatgctatcacagcacaattcacaattgcaaagacatggaatcaacctaaatgcctgtcaaccaatgagtggataaggaaaatgttatatatataaaaaataaatatataacgtatactcacatatacatataataaaatgttatatatacgtatatgcacagacacacatacatacattccacggaatactactcagccagaaaaaagaacaaaacaatgtcttttgcagcaacttggatggaactggaggccattattctaagtgaagtaactcaagaacggaaaaccaaatactgcatgttctcatttaaatgggagctaagccacaggtacacgaagacatacagagtggcataatggacaattataccagagagtcagaagaggggagggtggaaggcagtgaggaaaagctacctattgggtaccatgtatgctatttgggtgatgggtatactacaagaccagacttcaccactgtgcaattcatccatgtaaccaaaaaccacttgtacctttaaagctattgaaatttttgaaaaaaattttaaaaattgccctgctcttcaaggagggacccagactgtatgaatgcaaccacttctgacctgtctccagcagcagcttcacgatggagaagttggagtgggacacgctgtagtgaagggccgtgttcccgttgtgatcggccaagttgacaagcagtttcaggaagtgtggggagtgaggctggacctcgtggaggtaggaggccaccacggcggggctagacgacttccggctggagacgcggaaccactcttgactgatggtgttcaagctttgcctctgaaaccccaaaaaagaccaattccaagaggttccccggccagcaagagttcctcccttacacaaggaaagacagctttggcctctgtccctgcagctccctccagcttgccatgtgatttattcctgaagggctcagagctggtggggttaggaatgcagcaacatactttgtacttgtgcgatcagccccctctgggagtggaaaggaagactgggaggacagcctagtaaccagtaacaaggcacttaactggaaaaagtttgagtctgcgggaagtttagctcacaccccccagtaagaagtttagctcaaacccctggtatgcgcacaattacaaaggccctctccttccccctcacacagccagcccacaatgacctttccccagactctatcaggacacctgcgtgtgtttaataggcatagctggaaaatcgcaacatcttactaatgggaaacatgcatgcgaaggcaaacaacatctccaatttatgcttgaaataaaacccaaacaggtgtgcttgacatgtttggcttttaagctttccaaggaccttgagagtaaatggtttaagaacccacggcaggaccctgctatctgcagcattcagctcctctgggaccatgaacgagaagagttccagagccaatgacatcaactcttgtgtgtgacatgagctcagtgtttaaagggtatttacctaatggggaagagaagctattgagaaatgattatgataaatgattgcatactcatgctgggaagagtcctagacttgggagtcactgaatcgatgtgacacagtttaatccctggctcggccgggcgcggcagctctcgcctgtaatcccaacactttgggaggccgaggcgggtatatcacctgaggttgggagttcaagaccagcttgaccaacatggagaaaccctgtctctactaaaaatacaaaattagccgggcaaggtggctcaggcctgtaatcccagctactcaggaggctgaggcaggagaatcgcttgaacccgggaggtggaggttgtgtgtgagtgcaccattgcactccagcctgggcaacaagagcgaaactccgtctcaaattaaaaaataaaaataaataaataaataaaatcactgactcagctgtgggaccttggaagtcatacaacctttttgatccttacttgtcctgttataaaataggagtaaaaggggactggccccttaccttccatggctctacagagtgaggtccttacacacctgcttcttcctctaagatgggggcaagggagacagtatccggtgctttgatcctaacatgggtgtggtgccgggcttgcatatcctctgatcacttttctagagcagaatcagtggaatcttttgtggctgaaacactttaataaatcagagtatctcctttatccatgggatcttcaagaaaatctggagaaagatcctaatattaaggaacagaggggtggattttgttttttgtttttgtccgtttgtttggttggttggtttcttttgagacagagtctcgctctgtggcccaggctggagtgcagttgtatgatctcagcttgctgtaacctccacctcctgggttcaagcaattctcctgcctcagcctcccaagtagctgggattataggcgcgggccaccacacccagctaattttcgtactttagtagagacagggttttgccatgttggccagcctggtcttgaactcctgacctcaggtgatccgtccatctcggccttccaaagtgctgggattacaggcgtgagccactgcgaccggtcgagtggtggattttgaatgaagagctaagaaagaccttagttcgataattcaattaagaataagtgacaggagttttgatcaacatccacatcacatattggttctttttttttttctctgtgtttttgtgacaggatctcactctagtgctaaggctggagtgcagtggtgcaatcacagctcactgcagcctcaacctctggggctcaggcgattctcccacctcagcctctgagtagctgggactacaggcgtgtgccaccatgccaggctaattttttgtatttttttgtagagacagggttttgccatattgcccaggctggtctcaaactcctgggctcaagtgatccacctgtcttggcctcccaaagtactgggattacaggcgtgagacactggccctggccctacatattggttctttagggaacaactatttgtcaaatcagctaagataaaataacaaaaatgagttgggtaagaaataaatgctgatgaattgatcgtttttacttctagggctcttttgcaaaggagagcaaaatggcttttaaaaatgcttacgggttgttccaccatgggtcttacagctgctctcataacttgggaaaatgtgtctgtgccaatatcccttgattaaaagtagaatcactatgtgtttaaatctctgtaagccatgaaggtgtgaaggagccaatgcgtattttcttgttttcagtctcttgacccagaggtacacttcaagaaaaacagtaatgactacagaattaaacgtcagggtttgagaggaatggaaacatgccatccaccaccttcattttattgatgaagaaacagaggccctgagcatcgaactgacttgcctaatatctcacagatgagggtcctgggaatagaaccttcagttcccattctacatgcttttcacactctgtccacagtcctctcaaaccacagggccatcgtgagcctaagccacagagtttgatgacagacactcatggtgcattgcctaatgacacatgggaagcgcctctgagcccccggcctgctttcttgtgcatatccatgggctccacttcctcagtgtgacccatcacttcaggcagcagtgcttgggtaaaggagagaacacccagaggaaatgggccctggcctgcacactcacaccactgcctcacactgtgcactgcacactcacgccactcacaccactgcacacacaccactgcttcacactgtgcactgtacactcacaccactgcctcacactgtgcaccgtacgctcacaccaatgcacacccacaccactgcctcacactgcatgctcacaccactgaacattcacaccactgcctcacacacacaccactcacaccactgcacactcacaccactgcctcacactgcacactcacaccattcacatcactgcacacccacactactgcctcacactgtaaactgcacactcacaccactgcacactcacaccactgcctgcctcacaccactgaatgggaccaaagtcaccctggcagagctaacgtcttaaacagaagggaaatctttacatgacaatgaaaaattagagtaccaagagctggtctgtggtggtcccagtttctggcagatgctggctcagtgcccggcatgcattaagaaattcttctgagggtttatatctaaataaaacaaacatatatacacatatttatataatcattttcaagttgataaacaagactttcactctcctcctctttcacatctcagcagctcaaaaatccaaactgggcaactgccctaggagagggtgagcttcaaaaatctggagtgaccatggtgtgtgccgatgtgacttggcttctgaatgcttctgaagatgagccgagtgtgttgcccatttaatcctgcttttgtcaggggctggggccaataaccaaagcatttaggtggggggtcgtggtagggggtggtggacaggcccacctgcatttcctggcatgctgggaaggggaggcctgtctttctgactttgaaccaaacattttctgcctgggtgactggaaaaaaaaatcaaagaatccaatccataccagaaactttcttcaggttattcttccatgaaggacaccgtaagtactaacagagtcagtaatatgagactcgttgaagctgggtgtccacagtgacaagcactcttcctgtgttgatctgaaggcaggctcagcaccaagaggcctcaggtgaggcttaagggcactgctgggctcaaactcctaacctcaagggatcctcccatctcagcctcccaaactgctgggattacagctataagctgtggtgcctggctgctcccatcactttaaaagacacatcaccagccaggcacggtagctcatgcctataatcccagcactttgggaggctgaggcgggtggatcacaaggtcaggtgttcaagatcagcctggccaacatagtgaaacctcgtctctactaaaaaatacaaaaaaatagctgaggatggtggtgagcacctgtagtcccagctactcaggagactgaggcaggagactcacttgaacccaagaggcagaggttgcagtgagccgagatcgtgccacttcactccagcccgggtgacagtgcaagactccgtctcaaaaaaaaaaaaaaagacacatcactttaaaagccagcatggtcaacaggacaggcagaaaagcttatgggtaacaatgagaaggactggggccagggtccctattctgctagctgcgtccccacacttccctaagtctctgtttccacaactgtagagtggggaggtcacaataacttctgtcctgcaggactgttggaagttgtgtatataggataatacttgtaaagtccttcacagtttcagcactaggtaaatgttgactttacaggtagatatcggctgtgacagtacattccacgaaagcaggagccatatatctactttattcaaccagtgcacagtgtgggcatgaaacagagacttaaacaacactggcaaatggatgggtacatgaatgaacaaatgatcgcatgaacgggtagatatatgcccttgacctttttcagaggaacaagtgcccgcgtttgtgtccatttgctcacctctcggccttggagtgggggacttcttccccaggcccactttcctgggcagcatggcaggtgccctcagggatgccctgcccagcctcgcaggtgagatgggcatctttgacatgcttgtgatctgggccgtcacacttcttctctgcctcgctgtcagacaagtcctctggggtgctgtcctcaccgctggtctcctcacttgaggtggtctcatacctggggtagaaaacaaaggtcactcgtcctgtctttcctgcccagtgcccatgtcaacaccagtgagagctgggtgggcctcgggtaacactccgcagcttgctaatctcctcccccactctctacacctgccggcagggtgacaggctcccaggaatcttggtgtcagaaagacatgcagtaaagggccctggctctggtgcagagaggctatttggggagactcaattaactgtgcttattgtcaaaataattaactgtgctcattgcagcaaacccacgagcagcctgtcccctcactggctgatgcgttcggtgatctagacaggccatccagcgttctcatgaaagcatttgcttgtgcaatcctaacgttaggtccggagaggggcccaactctagccaaacatccccacctccaccctgaattcaccaagttgcctgcaaatcttcacatctctggatgagaccgagacctcccttcagactgctccagcccagcttgcacttggcaaggcatgaactcctccacacctacatccagtgctctgtgggataccccagcacagcacctgcctgtctttgctgcagcctgtttgaactattgcttggagcagcaaaaaggagagcacaggccacttgactcgtggccctctttcctggtagtgacgcttatgctcaattataagtgactctgttgagttggcagaccagaggccatggaggaaagtcctggaagatttattgactcctctactgatattcaacaggagatccctaatggagaatgctggtggtaagatgatttcaggttcttgggccattggacacagccacagagactggtggccatggcctccattgaaccccctaaggacccttctctgaatggtggcctctacataagcccctgtgctcaatggatttgtaaactgagtctgctccctgctatgcttgcattctgtctcacttaaaccccagacatttcttcctctattatgtatggaacagcctttcatgtttgtgattaagagagtggagggcatattacatttaccaaacagtgctcatcttggaactgcttccataaaaactttgcctggaagttcacttattcattcaacaggaatttattgagcacctactatatgccaggcgcagttctaaatcctataccaaagtccctgccctagtggagcttatattctagaaggtagagtcagaaaatgaacatgtaaacaaatattatatttaggtagtgataaaaacaatgaataaaatttaaaaaaaaagagccatgggatagaaggataagaggagtggctactttaattagagcagaagttcctaaccttagtggtacattagaatcatttgagggtgtttagaattcccagtatgtggactgcacaaagactaattaaaccagagtgttcagggaaaggattcagacactgggatgttttaaaagctcccctggtgtttccagcgtgcaaccaaggctgagaatcactgtactggagtaacaaatgctgaggaatgtccaggagaggaggcctttagcagggaaacagcaagtgccagggccctgagatgggcctgacctcagcctgttggagggagggaaggaacggcagtggcaggggctaaggctgggcagagccatgatttggttcttccacatttggatgcagagtggggaccattgggggcgtttcagctggggagagacgtgacctatactaggctttgagattaggctgattctccttttctgtacatgaactgtgaaagcacatgatcccgtgtcagatgttagtggaagtgggaacagcaaccctcctgtgacacccagttcatcattttttttctttgctttgctttttttttttttaagactgagtctcgctctgtcacccaggatggaatgcagtggcacaatctcggcggctcactgcaacctctgcctcctggattcaagcgattctcctgcctcagcctcctgagtagctgggactgcaggtgcatgtccccacacccaactaattttgtatttttagtagagatggggtttcaccatgttggccaggctgatcttgaaatcctggcctcaggtgatctgtccacctgagcctcccaaagcgctgggattacaggcatgagccacagcgactggccccagttcatcatttctgatgtttccccttgttggcgtctaatgtcttcccttctggtgtgactcaaattagcagggattctgagctctctgggcagccttcagggtttgggcttccacagcatcctgtgcttcctcacctaacaaaacttatctcagcacatcagcatttcatctttatttctgttatctgtgagctaaaggcagagacctttatttatttgactttttaatctccacgaccgagcacactgttggcatttaataaatgtttgttgaatgactgatttagaaaatattctaaatcaaacattcaattctatagaatatatgaggttttgttcatgttctaagccaatagtctagttgtttttcttcatccccaaacacttgggtttggcttgcaggaagttaaagaaagaaaaaaattaaatggatgaaatttgaagttccacgaattaacagaatttgtactagtttcagttttatggttcaggttaaatgtcttcctctaagggcccgtatacccccaaaactcccagaagccacctggagtcctggccctggggaagaccaaagccaagacatattaaaagcagaggttccaacagaccaccacagctggcaagaagccaaacgcatgcaaacccgagatggagttttaaagggccattgaaattaattcccttgaagaggaatgaaaaccagatgcctccccctaggaaaagagagtgcaaaggacaatagcaggagaggtagcaagaaaggcagtctgagcttcacaagcgatgcttacccaccgttaaccccaacaaactgaaggttctttttggtcccattacctcctgcacggaagccatagtctttctttttcattatggatttaaggctggtcgatggggagatctctaggcagacacaacatcacaggttagaatgatcttggggatgcatgggaatgtagcaaaaccaggatattgctttgaggggacaagggttgcaggtgtgtggagaggtaaggagggacagggaaccagatcatgtaaatcaatgttttggggacctcttggaggagccttgctttctgctcaatgttgggagaactgtctctgttaacaatgcccctctaagtgtggatgaagaaccatgtggcgtaggtgccattgttgtccctgtcttacagctgggaaatctgaggcccagacttgctcagtgaatgggagtgtaggagcagaacgtaggcctctggactcatggtctagcacccacttctgctcaagggcacctcagtggtccttcctggctcacaagtgcatactgacactagggttgtgggggtggtgatgacaccgtgctcacagtagatacacgagcaaggacacagatcttgcaatgtgctcaacaggacaggaggcggctcccaacggggaaggctagaactagcactgaaacaatgagaaagcagtcaaattgtgatttgtggcaggaagcagactcgcatgctgccctgcaaagcaaaacgtggttccactttacccgacagtgaagagggtttgatctgttacaacaggaagtgctgctcagccgaagggcccatttccatatgtgagcagcacttaatctcctgcccctgtacacacacacatgcacgtacacacacacatgcacgcagagaaaatattcagtgaactataccagatatcaatataatgctcctccaaaaccaggccagagaaaacctctactatgcaagaaccagagaggaacacaggaatgcaaaagcccaggaagaggtctggagtccacgcagcagggccattcttggccccagacactgcctttgcacaatgcaaatgagaacagccccctctgggtggatgtggtgctgcagcgcaaggcttggcaaatggagtgtgggctggctttcaactctcatttgccctccctggctggcatctttgtgccctgtgctatccatacagctgtaggcagtgggcccatagtcagacccaaccttagagcaaaggcaagagtagaggtcccgagcctccactgtcacacacatcagtttttattccactgggttcctggaagtactaaaatctttttttctttttttttttttttgagatggagtcttgctctgtcacccaggctggagtgcagtggtatgatctcggctcactgcaacctccgcctcctgggttcaagtgattctcctgcctcagcctcccaagtagctgggattacaggctcctgccaccatgcccggctaatttttgtatttttagtagagatgggttttcgccatgttgaccaggctggtcttgaactcctgatctcaggagatcttcccacctccgcctcccaaagtgctgggattacaggcctgagccactgctcccagctgctaaaatctttttaaaaacatgttaatataattgaaaaccttgttccctctgccttatcatgtgaaggagaaatggctccctgtctcaggcccctatattgatggtatttacccactggcggggaggaggaggaggccggtggctccttgggtgggtgagcctgggccgagtaggccgacagcagcaggttgagggagctcagcagctggctctggatgctgctgagcttggaggctggctgcttgatggcgctggccagctccgggtacccatgctccaggcagttccactgctcctgcaggagctcctggatcttcttcacatactgcccaatagtggcatccgttggcgagcttggtggccttcccgggtgctccttccctgggagattggaactggtctcctccctccctgctgggggagtctttctgtcgctgccccacagaaagcctcctgctcccctggttcctccctgagggcctccttcctgttcagtgcctgcttcttcaatcctgagttcagtggagaggaagctatgtacagaggaggtaaggacctgctcgggtccctgtggcagtgacagctggggcagaagcacacgttctgctgggctctgattcccttgtttatgaccatctggcccccataggaggccattctcctctcctcggtgcccccagctttcagactccatgctgcctagaaggttgacttcaatgcccttatcacacgactccctggtcaagagtccatggacagggtcagtgttcaccatcacgtccgtctggccctgagtgtctttggcgttctcttggtgaaactgtccttccagttgggctacagtgaactccagctctcgaattctttgctccctagctttgatttcctcttcctgctgctggagagcagttctgacctgtgccagttcctcggttcttccagacaactctccctccagggccgagacctgctgtttcaggctggagatgctgcctggatccaccctggcaaggcccaggctttcctcagttaccctgatgccaatgcttctcatgtccacctctacaggtggcgggggtggaatctcgctgatgttgagctcgatttcttccaggaggagctcattctcagggatgggtgatggcagaggtggcgggcttggcgtaggggagccaggggtgaacaacacctctgcttctctggcattgtgttcatcttccttgtcctctagaactacaagcacattctggaatgagaaaggagggcctgggagagggaggtgatttggaaccttcaccacaccctctggaggctcagctccctcctggaccagctctggaatccgagttgatgctcgtgggctggagctgtggaaacctgccaatccttctgcaggttcaaaggtgccatcacagacactgccttcaccctgaaggggagggagggcaggaggggcagggggccccaggctcaggcctggctcctcagaagccctgctgtgcagcagcgtggcaggcatgctggatgctctcaagagctggggccgtccactcccaaaagtgagctcggcatcctctggctcagcagcttccaactgtctggtggcctctgccaacagagccttcctgtggtagctcacctcactcctgcttgttgaggcctggggggcattaccaagcggtggtgactggttttgctcctgtgtcccaagtgatgcctcccttggcaccacgggagaccagttttggaggggcggggctgcaggggggcgagccccactgtcaggaaggctgaagtttcggggcagagtgctaaatttggcctgcttggcccttctgtggataggaattcttttgatagtgtttcccttctcgatgtcatccacatacttgaggaagtccaggtctaaatgaaagccatatggggtctccacagaataagggtggctcttcggagggtctttctcttcatccccctgagaggactggtctttggctgggagacataagacaagttaaaaaaaaaaagcacaaatttaattaagcattacagggcgatgaggcctaatatctctgattttaacttaacgctgtcacttgagacttcttctaaatgttctagcctcgaaattatgctgagatgctcagtctttttggctgtattggaaaatcatcttattaaatcaatgtgtacttagccaatgtctgcaaggaaacagggagagggaatggtttccaatttgcagtatgtcatctgggtttctactggggaatctgcctgcagactggcaaaaccaaatggtcttgtactgcttttctgggtttgaatcacataattgctgcactgaagtagccaggaatttgccaaatcagggtactaattggcaattacggatatggaagggtttaaaggataagatacacaagtggctcagcagtaaaaaagaaatctgcaaaaacaaccctaacttgcatgactcaaattggtagaagtaaatcttgctaaagccggaggtatcaatgagttatgccgtttacattatttaagcttgtgcagatgcctgcgcctcaggtatgcacagatcagagagagctggaacaagtaatcatccatggcctacgctctttgcatgtgaaaactgcctagtgcttaacaaacacgaaattcactttcataaacccatgccaagtaaggaaatacctactttggccagtaactcaatgaagaaagaaagagagaaagagagagagagggagggagggagggaggaaggaagggaggaaggaagggaggaaggaaggaaggggaaggggaaggggaagggaagggaaaggaaaggaagggaaggaaggaagagagaaagaaagaaatcgcatttttcacacactagataaaaggtggtaaaagggccaattaatgtcaaaagggacattggtatccatcctccaagaagaatgggacttgactttccagggcaacccataccctggggggccatcatgatgaggaagttctccattacaccaaggttccaggatctccttgcagcatccacctgttgactccaacagaggacactggaaacaagccagtccttcgactatctgcatccataggggcctgttgccaagcaacctcttcttcaggttaaatagtctttgtttcttcaatattcctcatgtgacgcccctaattacctctgtgacattatgctaaacaggctctgaaaatattgagctcaggagagaacgttaatggagagtacagaggttcagaatacagattctggagcctggtctagatctctgctgtgtgaccttggggaagttacttagccttcctatgtctcatcatctgtaaagtgggaataataacaggtaaaataagattattgtgaggacggtcgggtgcggtggttcatgcctgtaatcccagctctttgggaggccgaggcaggtggatcacttgaggtcaggagttcgagaccagcctggccaacacggtgaaaccccatctctactaaaaatacaaaaagttagccgggcatggtggcaggcacctgtaatcccagctactcaggaggctgaggcgggagaatcgcttgaacccaggaggcgaaggttgcagtgagccgagattgcaccattgtactccagcctgggcaacgatagcaaaactccatctcaaaaataagactattgtgaggactagttaattaataataaagtattttggacaatgcctcacacatgataaacattcagtttatctttgtggaatcccaaaatatagacaatggaagccccataatggaaagtgacttatatgactcactgctggtctccacaaacatgttgtgactggttgattgcttggttttaagggtagtaggccctaggttaaaattacaaaatagctgtgattcaattcacttacctcaaccacccatttattgagcacctatgtgctaagctagaccctaaggacaccaagatgaatcaggttcagcctctgccttcaaaggatttatgatgaggcaggagagacacaaacacatacaatgcagtgagatagggagagtaacagatgcatgcttatagtacaggcttcttccctgacttatttttctagtttctgcagaattattttttttggacttggaaaacaatttttcctaggtaggagagggatgagtttacataaaagtgacataagactgggtgataaatgaacaaatagggacttgccaggagaacaaaagagtaaaagacattgtagcaatttatcttcaagatgaccaccaccaattcctaccccctttggacaagcaagcttattttatagttaaaggtggagtctacaattccaggcctttgaatccgggttggcctgcaactgctttaaccaaaagaatatggcagatgctgagagatcttgaaggctaggtcataagaagccccatagcttccacctgggtctcttacaatgcacacttattgggaagccagctgccgtgtaataagtccacctttcctgagactgccatgttgtgaggaagcccaaacagccccacagaaaggtcaagtggagggagggaaggaaatgcccagtcagccccaagcagttccagtcaccctagcccagatgccatgcatgagtaaaaaagtcttcagccttcatctgactttaactacaggagggaccccaagtgagaatcactgaactgagcctgtattaataataaattattgtattaagccaccaagttttgggatggcttgttatgcagcaatagatagccaagacagaaaatctagatctccacagagaatgtgcaaagggatggagggtgaaatcacacagtatttcaaagttctataaatgcagctgatatggccagtacttaaaacatggtagagaaagataaaattggaaaggacagcaacagccagatcatggagcaacttgtatgcacgcgaacaagctttgactttacgctctaggtcatgggagtcactgaagggttttaaacaagggagtgacttggttgaatgtgatttcaaaaagagcatcttgccaaggattaacagaaaggcaaaccagaggccccaagatcagctgggaggctgctgacatggttaaggtgagaggagctcaaggtaatggagggaaagggacgggtttaaaaaagttgcaaatggtggcatttcctggggcacattttctttcttccttccttccttccttccttccttccttccttccttccttccttccttccttcctttctttctttctttctttcttttttttttttgagatggaatttcgttcttgttgcccaggctggagtgcaatggtgcaatcttggctcattgcaacctccgcctcccaggttcaagtgattctcctgcctcagcctcctaagtagctgggattacaggtgcgtgccaccatgcctggctattttttttgtatttttagtagaaagggggtttcactattttggccaggctggtcttgaactcctgacctcaggtgatccacctgcctcggcctcccaaagtgctgggattacaggcatgagccaccacgcccggctgacccacacaatttttttttaaccaacttgctcccccaccttcccatcccctcgcaaagaaacacactggcaattttagtaaatgagagcaatatcttgtatttctctccattagttttccaagttgcactggctgtactcttagacctactggtctgctcaacagccccacagattataaggacaggccaaacagagaagagatatttatctaaagttaagtagagagcagatttatgacctagaaggcaaagagctctcctaaaggagaggctgcattatttatctgcttattgcctcaattcactagaaatgcaccgatttgcccaacggcctctgggcgcaggtccagagcacaaatacaatcatagcataaaataagaaacagcagattcaaaggcagaatcctccacaagggagaggagggcaagtgaggctgagcagctaccaaggatgacaggtttaatagcaggtttaataggtgctttcctaagctagcgcgcgcacacacacacacacacacacacacacacacacacacacacacagagtgatccatcatgctgccttgcctgccacctgccattctgcattccttctctttctcccagcacaagaggaatgctgggctttgatgagggagtttgagctgataagctgagagactaccctcacatgcggctctgctcctattcattctacctggtgacaggtatgcgggagctcagaattccaggcactgggccagggtgagaatcagttaggaagacctgactctgttcaaaatgaaattcagatcaaataaaccaacacatggccaacctggctggatttgaatcatggctgtcatctcccacttgtgtgattctggggcaattatttcatttccctctgcctcgatttctccatttgtaaagtggagataataatgcctaacttacagaattgttgtcattattagcacgaatgcactagagaacacagcccagagtaggcgctcagtgaaggaccctaacagcaaggatgggctggttctgaatgcggcaggcgaggattcactgagcatgtgctgtctccctacagctcaagagtgaatgagagtccaagaaaataattctggagaaagtgggaaagtgagtctggggagaagaaaaaagaaagctagaggaggctcagagctacctggaattccctacggagtcttgcttaagagaacaacagatcactagatccttgtataggacctacaaacacagtcagcttcagagttacacacagacaagagaaaaggggacttcaaggggacaaggtaaggagggagaaccacagtaattatctgaagggacaagtgaagtaaagcaggtgagcgaaccaaccagaggcatttagagtgtgaaagagaaattcaaaagcctatattcagtctctgaagtaaatggggaaaaacagaaactagagagaaagtggctgaaaataaagccagaaagaaggggagtaaaatgaaactcttccaaaggccaagacagggagggaagccttcccctctgggaaggcttgtccctgttctgggaggcccatggctgaaaggagggagcctttcttgggctcatatgggcaatcacatggacagcagacctccccagtgtgctgagaagggactgagaggcagctgggctaacaggcccccggagctttgagggaatgagtgggtgttctgtgggaccactgccagggatgcactgaaaaggcagctctctggggagaaaggcaactcttgaaataaatgggaactgcatttggaagaagaggcagggcgggaactaatgtcaggtccctaagtcccgtgcccgtgaagggccatgtgattcaaggggaattagaggctctctttttcctgatatatggtgatctagaaaaaaacatttcattagaagtcaggagattggggtctagactgtggccttctgcaagtttcctggggacaggaagaggggaacatgcagacattcattatgctaggtagttgttactcaacaactttccatgcattacgtaatttagttctttaccaaccctatgaaatagtattaatacctgtttatagaaaaggtgttgtcaactgtttgcaaagatagccacaataatatctgacccttggggtactcctctaccacgctgacactggatgatggccttatgacttgtgtcggccagtgggtcaacagcaatatgacatatgcagagactggaacattatctgcacattggagtcagtctgtccttgtgttgtgcttgaactcttctgtcaccatgtgaacaagccctagccaacctcctggatgacgagagacacgtggccaagtcattactgataccccagatatgtgagtgtggccattctaagccatccagctcccagccaagtcacccagaagcccatggacatgtgaatgaacccagaaaagatcatccatgccagcccaaaccagaataatggccctgctaacacacagaatcttttgagaaataattaacatctttaagtgactaaattgttgggctgtttgttacacagcaaagctaactgatacatgtgaggattgaggatcaaagacattaaatgacttgtagaatcacttaggtataaatggaggcttaccatattgtgcctctttcctaggctagggctggagatacacaaaatctgaaatacatgcttgagcctaccagcactgcctgtttgagggatatctcctgcaggcctttcctaggctatttccaggatttgtggcaacaattctttcccagcccaagtgcttatcttaaaccaggccctacaaagcagcttgcctaccatctgtcttctccatctttggagcgctgaccctcagtgtctcaggcactcttcatccaatgagtctgtaaaacttgttgaaggttctgaaagaaaggaggatacagaagtggtgagtctcattagcgtttgaataagtattggggaaacacagcactaaacaaagtaacatccatccctgcctttctcccagggtgcccatgagctcacagccctccaaggaggaagattaaaaacctgtacacatttctagagcccaattctgggtgtttcttcatggaatattagcaatagttgacatgaaaagaagtggaagtatttggtccagcggtcttgcttggcagatgaggaaactgaggctgaggagttaattgctctaaggtgtctcagactattcgtgaaggtgctagtatcagacccaggcttctgataccagcacagggctcttgccataatctcaagagttgaaatctacctatccccatcctgggaagggacttataatccactttgcgaaaaagctggaatcagagtacctataaatgatgtgtgacatgtcaatcaaacagaagacagagatgacataattgcaagtactgacagggagctgctacttagaggtaatttctaaccatgggcagaacaaggggaagttcaacctgggtggcccgaagacatgggtaactattcaagcagaatattgccctggctctgaattagtgtgccttgaggtttgaccataaattctccccaaagttttaatccatttccaggactctttcttcaaatggtaaacatcctagctcctgcccccattacaatgaatcacccaggaaattggctttttatgattgtaactccacatacatcagaataatgaattatctgtgacaccgcagcagtggaagcagggttgttttaggaattccaatgtgcttgacaatgaactccagaccaggaaagtgaaccagtgatgagggaaggactgggagaaactgagagtgaaagaaaaggatgatgggtggcccccagaaaccaaggatggaaaaaaggggacaaacaagtaactggagaagagggctggaaaagatgaggcctgtcaaataagagagaaatgccaaagtttgccaccagaaagtttagcatcacttcttcctgcgagtgctgcttctgcctcatctcctccagcccgtttgccaagcagctgccagacaggccttgccctatccaggtggatggagccccaaagggcaggcatgttttctagaagcagagacaatccttgcagaaggattggcacactgagtaccttgcttacctctgaggcagcaggcagtgcaccagcacatcctggtttgttgaaaacaaagagctagagaagttagagacaagggagctgagagtgtaggtggtcttgcagaggctgagagtggccgccaaggaggcagacggtggagaggtgtggaaggttctaacctggggtgaggcaggcttgcccttgttataaagagaaggctcccaggcagagaacaccgctgcctctctcaccaccccagctctgcagtctgcagcaggcgatgctggcatgcaggaggcagtggcaggtgaagcctgcagaagaaaagagtgaggtggcaaaccctaagcttgacccttcatctccaccatcgcagcctctcctgctcctgctcccctctccctcccacccctgtaacattactaagcaacgggcagagctgggagtacttgacattcatgaattatctcatgcaatctttacaccatcacccaaagaggattattattattcctatttttaagggagggagactgaggctgagagagttgacagggctgatccatgtcacataacaagcaagtgttgtagcaggatgtgccctcaagtctagccgactccaagcctgggttgggaacaaaagtgatttgtaagcctttgtccaccctgtaagtcagccgggttccctgacactatgactgatctttaattccccctgtgaggggaaatgcttctgactggtgcttctctgcctctcccacagtaaacacaaaaagcctctgggcttagaggagaactgctctcttgtaaagcctcctgagccaaaggagagctctgcttctccaaggctggagaagctcctactgcagaggagggggccacttgggtacagctggacttttggcttcacaaactctcatcatcagcctagggacttttcaatcacacgcctagcctttggttagaattaggaattcagcccatcgtatatcagatcatatgattttaaagaattattcagcacacattaggtcaaatttcattaaaaagaactctgtagagacctcgaagatttctcttagacttggatttctcttagacttggatttcagtaaaattaatcatttcaaggctacagaaattaagtggagctgacacccaactctcaaaggaggggtttctcggcaactttttactctaaagggctcataatacaggaaggaaggaaggagggatctgtcgtgtgcacaagtcaccacttccagccccgactcccacccccagccttccgcactttcctccatggtcctagcaacagacatcgtggagcttagctaagggagtttccttccagtgggcaatgctcagtgtggttaggttaggtaaaaataactgccacatcaacatatgcatgctaccttgtttgcaataaaacagaatatgaaaatagctttatgggacacagttcccctttaaaatggaattttgcaactctctggagcatttaaagctttgacataaagccatttcttttgatctcagctcactgcaatctccgcctcctgggttcaagccattctcctgcctcagcctcccgagtagctgggattacggtcgcgcgcgctaccatgcccagctaatttttgtatttttagtagagatggggtttcactatgttggccaggctggccttgaactcctgacttcaggtgatccgcccaccttggcctcccaaagtgctgggattacaggggtgagccacggcacctgatcataaagccatttcttacccattctgttaagttgtatccccactgttcagaacctttaaatacctggtgttattacgttacttttcatttgtttttgtcctatgccaggatcaaggatccagagttagggcccaacctctctccatagctcatcatattctagatgttttgggcatacatagcttgctttctctctagctcttctcccctactaatctgtaagcttgtgaaggtcagaattattgcaagtcttattcccatgtcacccccaactcctcatgtctaactcacggcagacactcagtccatggttcttagatgaacaaaataaaaggaacaaaattgtctgtcttcaaagggaacccatggaaagaaactaacaagagctaagcacttacactgggaatcagctactgggtatactttctcatttcatcctcatacaagcaatcctaggaaacaggaacatgtccaagttacaaacgaggaaactaaggcacaaagagtccatgtggctaatccaaagttctccagttaattaggagcaggatagcttgtgtgactccatcattccacagtgcctttccaagcctatggggcggtaaggaggtgaggaccaaggctgaccattcaaaaatccagcaaagaagtggtcacttggcagacagcgatgatagtccacgtgcagctaccaggccagactggaaaccattccagctgggtccaccctcagtgcccaggaacatgggtttccccaggtaagcccaactcctgcagcatttatccgcaccctctcctctccacacttacgccttttatgatgccattttcaagctcatttctaacctcaaatccaaatataaagagaccttcccttacttagtcttgaaacaaacctggttctgtacttttgttctcttcaaacctctttttattctgcaataataaaaatgtggtatttcatcccagagcaggctgcatgccaaaataaatagcaccttggatttccttgaaaagacagcttggctcaagtctcagcctcattgccacgagaattcttggagaattcaaccttacaaagtcaagtatttagcaaggtagttcaccaaacaacaaccctgccaatccctgcatgatcccttgcaaagacaaagcactctttccataagaaaaaaaaaaaaatcacctgtaccttggactgatcatgccaagatgatgagagcttcctctttccccatcccaggaccccagcctttcaagtgcaaatattccctgtgccaagaagcaggaggcatctgaccgctgcttctaaacattgagagggccgaagccgggacaccagaggaggtgagaagcactgagaaagattctgccaactgagttctccagcgggctcacctcctgccgacctggcaaacagagatgagtcctgctcaataaatgacacattaacacaatctcattaactccattcccacgttttttgcaagtgtgtgtcattttcgcctgcattgcagcagctgaatctggagcttcacgaagaagagaaaacagtcgggaggaacgctgtgcccacattaccttcccttgcatcctcctgctgcatagcccacagcagggaggactcgtctccttcccagaaagccaggtttcggctgcagggccggagctgatagctcgtgccttcagcacagctgtgtctgtttcgcagctgttaaaggacttggtcaggtaatccctgaccttgctggaaaagcaaatactgacttcctttttgctcccgggaataggtgagtggggtcagaaacgaattcactgctcaataaactaagactggatcttgcagaaagaggaagaacgctcaaatccttaactagaaagttagttcccagagctgccatcgcttccgaggaacacatctagagacatccaaacaacacacaatcttccttcttgactcctccgaatctggcagctcatctgagcagctataattaattatgagcttcttcctccctgcagctgatgtggctcattaatgaatttgttcctaatgaggacgtagcctccttagagttgaaacccttcagtagtgcatcactttcttcctggctccgctttagaaacatccttccctaccccctcctggggccccaggaccacatgaagcctctgatcattaaacaaacggaaatctgtcggggcagagccgagacaggaacaatgaccagtaaattcctggggctggactggcagctccttattcctgctgctctaccaatctgctgccctagagcaccaaaacacacccagttctggcaggaatgaaaaagcaaggaagtacctgctgtgacgaccaaattactgttcagtggatccacttccaggcagggtttctaactgcagcgcagaccagagactccgagaggcggggtgcaggagccagggagcaggcagctgccagaggagcaaggtttcagagtgtcccgggcaagcacagtggagggtcttcctacagcccaaagctgctgcagttcttaggagcagagacaggtgtgaggtgcaggcaccagactctacactctccaaaccctgtgctgctcccggacctgaaaggagcggggatggtccaggaggggccaggaaagcgtctgggttcctttatgcagactcagtaaaaggattagagggaccttgttccttcgcctcctggtgctctaaccaagtgaggctgtgctgggaaatgaagcctcacagtaagacacatcacatgtagccctgaccttcactgatactgactgtctggatgtgccttccaagaccagagcaggttcctgtctaacccatgctgaaattgatgctggcaaggagtgtcaccctgaaacgctgcctgcatcgagcctggtacacttgcaaagcactttccgtcctgtgtctcatttatccttgcatcaatgcttgaagcagccagaccagggatgaatctccccattgtaaaggtgaagaaaatgagagacagtctaagtggtttctcttgggtcatccaagagcagagtgtcctggggtaaagttctctgttcttcccattgccctagatcaagttccttacttttcttggaagattctagagactcttgctcaagatggaggttaggagactttgcaaagtacacaggatgacgtggtggtaggcaagtctatggaataccaacatcacttttctcaactggtaaaagtatttttccagttagctgagtacgcagaccaatcatcagaataaaaaaagaatccaaagtataccttgaactctaagggtatagaaaaaatatactgcggagcaaactgcttctctgatacacttcaaatgatcattgactatcctttctaaactggctagagaacagctggaggcacgcagcatttctctaagatgcagatggaagaaaagccctccatgttaccagcatccccaacccctatgccttactcagacgtatgtttaagaccagcagccagcttcatgctcctaccaagccacacagaccatctcctgaaccaaacatgtttatccacaagaactttcctgacaagaatcacgggactggagggaggtttggctccttttgcaatttagaaatgctcaacttctatggcccaggtcccttctgccccatgatggaaaaaaaggtgaactgtccaagtccagcaagatgggggctaggccagaggggaaaagaggttcagctatctgaagaatgcaccttttatctaagcaatcccttaggcttttgcactttactcagaaaggtcagcgctttggtaggctgtatggctgcacagggctgagaagggcacgcttgttaggtattcacacactcaaatagagcctctctgagcagactggtcacagacacagtcattcccacagaatgcaacttaaataggcagagaaagaaattatgcatgtgagacctgtgggtgcagccatccaggagggaaatcagctattctaaagattgactctacaaagcagatgtaattttctgagggaagaagctgggccagttgtagggagagaggaggctgcattaaccaatgaaaaatgctccttggagggaaaaaaggcattagacttgcaaggaaaaagacccccactccacatctcttttttcatttggatgcttccaaaatgttcttggtccgtgacttaaacataccgtaaaatcaaactgccaattgccaaatgaggaagtggtatgagcaggcaattcatcaaagaagaaatacaaatggttaatatttgagaaatgtataacctcacaaattaataaaaaagatgtcagataaatcctgacatgccataccctacaatgagccgggtactctggtccaatccaaacagcatcctattcccaaaaaaactctgccaagcttgtccaactcgccttattttgttgttgttctgttttgttttgttttaggcttttagtgcctgaagacataggttttagtttctgtctctagtgataagtggaaaagacggatgaggaaaggtctttactggcctaaccagaaacagaaattaagaacccgtgagtgcattctctcccttggacacccctgcgtactgttacttctattgtccaaagtcaaagcagaggcctaaagcacttgcccaggtatcgagaccatcagagccaagatttgaatccatgtttttctgatgctaatatgctgctcttaaccatggtacagcagactctcttatgagttagaaaaatgtttttttcaaagagcctcagtgttgatgaggaggggactcaccctccccagaagattgcagcagagtgggggcagctgcggccaagagaggaacttcaggccgtggcaatacctctgagcacaccacgactgtctcccagtacactgcctgcgtgtccaatggcactgtccagtttgtgcatgtgcataggggaattcaaaatcaaatacagcaaaatacaatggtgaagacagaagaagacaaaaaaaggtcatagtcacatgtgatttctttccttggtggtctaggaatcataactattatgatgtattcttggaaaataaaaaataaattatttggggggaaagagatgggaagtcaacataattctgccacctggctacagcaattttcatgatcacctattttgtatatttaacataattgaagggcaagttctatagtggacttgtagcctgggctccaagtcaagtactagctgaaatgccagctttgccaatgactgactgtataatcttgctcacattactgaacttccctgtgcctcagttgctttgcttgtgaaataagactagcagtatttcctataagtcacggagctgtcagaaagattaaataggatgacaatacatgcaaaccacttaggacagagtccggtacatagtcctgttcaatgagtaaatacattggttatttttaatataatagtagaaattcaattataaattcaattataaatccaattttgtattcaaaattctattatatagccatttttaaaagtatagttttacctgctttgtaatgattactataaatggctatacaaacgtccattgacttgcaccttattttccaaacccctccctagagggggtcatgccacctcctgtttaattctcccttcaatgctaccacagcagccagcctgacagacggtcctcactcaggtctccagggaagaccccatttccaggtggctggatctcagctgcatgggctttgaggtaagacaggccaggttcaaatcctggctgcatgaccctgagaaaatgtccttattcaagaagagcacagctcagtacaccgtgtgaagaccgcaggggataagggatgcaaagtgcttgtgctggtgcccaggatataataaacactcaatacatttggctatgattactttttaaaacccacaatgtgaagcaaggaaagggcaaggatcatatttgttttctttctcaccccatttttaacacttagcatgatgggaattcaataaaaacgtgttgaatcaaataaatagatggatgcatgggtggatggatcagagactgtcagagctggaaaggatttttttttttttttgagatggagtctcactctgtcgcccaggctggagtgcagtggcgcgatctcggctcactgcaagctctgcctcctgggtccacgccattctcctgcctcagtctcccaaatagctgggactacaggcacctgccaccatgcctggctaattttttttttctgtatttttagtagagacagggtttcaccgtgttagccagaatggtctcgatctcttgacttcatgatccgcctgcctcggcctcccagagtgctgggattacaggcatgagccaccacacctggccattacaatctctctgtggtctcaccaacacctggtttatgtttgtttgctttaaattatagccatcctagtaggtgtagtaggtatgaattggtatctcactgtggttttgatttgcatttccccaatgactaattgtgttgactatctttttcatgtgcttattggcttttgtatatcatctttggagaaatgtccattcaagttctttacccatttttgaattggcttgtttgttcgttgttgctgtgttgtacaagttcttcacatattcaggatattaacctcttatcagatatatgatttgcaaaaaatttcttcttgatatattttgcaataaccttgtatatggtataagataagcttccagcttcatttttttgtataatttaactaattaattaatttttttagatagggtctcactctgttgcccaggctggagtgcagtggcacaatcatagctcaccacaggctcaaacgcctgggctctgcaatcctctcacctcagccttctgagtagctggcactacaggtgcataccaccaggtacacctaatttttttttttggttattgagacagagtctctccctgtcacctaggctggagtgcaatgacgtgatctcagctcaatgcaacctccacctcccgggatcaagtgattctcctgccttagcctcccaagtagctgggattacaggtgtgcaccaccacgcctggctaatcttgtatttttagtagagatggggtttcactgtgttggtcaggctggtctggaacccctgacctcaagtgatccacccaccttggcctcccaaagtgctggaattataggtgtgagctaccatactcagacaactttatttttttgcatgggaatattcagttttcccagcaccatttgttgaaaagatcaccctctatttccagaacatttcaccaccccaaaaagaaatgccctactcgttagcagttattccctattccctccactccactccccattccctcccagccccaggaaaccatgaatttactttctgtctgtatagatttgccgattgaggacactgcctacaaatggaatcatacaccactgtgatcttttgtgactagcttctttcacttaacatgatgttttcaaggttcacaagagctaaaaaggattttttcaggtcacctaatctaaccctgttttcaatgtcacacagtaccttggtaatagagtccatacaagggcccattctgtgttttcttccttaataaccatgaccctagaaacacgtgaacacgcaggaggtatggcaagttctcaatgagaactgcactctaagcctctccttcaaggttttatgtctgcccttacatggtgccacttgactagaccagtatttccccatattacctattgttcaaatcctacccattcctctcaccagaccccacctcccccaggaagccatctggagagcctatttgggtagaattctctaatttctgaaatcctatagtaaataactactctttaatcggtgtgaggccacatgggattaggagtccaatttgtaactataaaagccttcctccaattgagaatggcaaatctctattttaatgggaggtgaaccctgaaaggcttcagaaatctcagtttgatatatctggacatgttttggatcacctgttctacacaaggaagtcagctgatcactgatttgtcagcctgctggacagggtagtggcaaaagtcagctttggaatccaacagacacgggttcaaatgctgcttttcctatatattgagaccttgggcaagttaactaactcgtctcatggtccctgtctagtcctgccatccacctttgtcactggataattgcctaatgcttcttgctggactgaaagctccctgacagcaagaatcaagccttcttcttctgggtctttcacagttcccagagatctcttaatagggccctagaaatgcccctgccattaagtgtctcaatctttgtgtgtgtgtgtgtgtgtgtgtgtgtgtgtgtgtgtgtgtgtgagacagagtgtcactctgttgcccaggctggagtacaatggcacaatctcggctcactgcaacctctgcctcccaagttcaagtgattctcctgcctcagcctcctgagtagctgggattacaggcatgcaccaccacaccccgctaattttttttttttgtatttttagtagagatggggttttggcatgttggccaggctggtctcgaactcctgatctcagatgatctaccggcctcggcttcccaaagtgctgggattacaggtgtgagccaccatgcccggcctcaattcttgaaatctataattctcaaagcagagtccctggcccagtgatagaaactaagggtttctaaaagaataaaaaatgcatctcaaatatgtgtattctcttcaattcttacaagcaagtgtattacatgggaattcatttttataaggaactaggaacataatatgtgagttattgagggttaataagccttggcattaataaacaaaaattagtgtgttagaagagtttactgagaatattcattttctattctgtaaagaaaggtgaccaccatccatcactaaacaatacagcgaaactcctgtgtatgcacccagcctaagaggtggaattccaattctcaggaagggcgttttggtattagtgcagaagacatttgttgtgtgcttttcttcagctacccagcacttttgtgaacacccttcctatacttggttatttccttctcagaagacccacctccccaagattgaaactggaatttacagcaagtgactatggggagatggtggcgtgatgttcagctacttcatatcccttaataaattcctcttctattataaatagataggcctgctagagcaggttctggtgttcgcaaccgtgacccttaatggctacaacgcagcatcggcaatctcttggttttaaactgcttctactctattaatttacattacttataaaattacttttaggagtttctgttgattgttgtcctgagtatttgctgcattactttgattagttttctcttctcctttaatcctttgttactaccaaattctctcccactgcaaagtaggagcgagtggactcagtgggccacaaagtcttttgctcccctgaactgggctacagtccagagggcttggaaaccacaatttggagtaaatgtttcctaggaattcagctccacttcctccctcctgggtcacttcagcgaaagcctctcaagggtaggcacaaatactccacaggggggcacccctgcacccaccctctttgggcagctcccatccgagcagcatcatccctggtccagaattcagcagatgcctctgcaggcatcagctgggtgccacagctcgagttgcaggtgcagacagtttagagcttgcgtgggctgttgcatctgccttctgggttgggaggaaggtttttgttggctcaaatatgcacaggctgcacattcaggaaaatcagtttaaaccaaactgaggctaagtgatccccagaacctgggtggagaaagcgatgtttccagatttttcaggcgggaaagctgttattatttcacaatgccccacctaaccctctggcaagttcagtctgacaagaagcggacatgtgtgatgtgggtccagcaaagatggtgaccacccagcctcggcagcatgccagccagaggaagggcaggtatcatcagagatgaatcaaagagacttcaggagagatgaagtgcaccaggaacttctctgaacttcaactttcccttgaaagagatgggattccttcagtgttccatccggtaatacaaaggaaggttatatattgttgtggcctgggttttgttttgctttaatgtgggcaaagttactaagaaaaggcattgccaaaattgacaatatcacccaggtttatatcaccccacggagcagctcaaaggtgtcacagaatggtggggcatttggagcatagcataggcagacttttattagtgactctgctcacatcttttcttttttttttttgagatggaattttgctctgtcgcccaggcgggagtgcagtggcgccatcttggctcactgcaaccttcacctcccgggttcaagcgattctcctgcctcagcctcccaagtagctacagggactataggcgcccgccacaaagcccggctaatttttttgtatttttagtagagacagggtttcgccatgttgcccaggctggtctcaggcaatcctggctggtctcctgagctcaggcaatccacccgccttggcctcccacagtgctgggattacaggggtgagccactgcacctggccttgctcacatcttttcttccagccaggttatgggctctttcaaatcaaggttccccttttgtgctcctgggtatcctttatgttcaatcagtccactgattatctactgttgggaggagagaaatataaaacagggtcttggacgacatttgcacccataaaggggcaactgaggctcaatgacctgcccacctcatacagcagggccaaggtcagagtctgcttttgagactcctaacccagtgctttcctttacaaatctcatgtactggtcctcagtgtgatattggaggacatggaattgatggtttctttaaaaagaatgtggccagcgtccccagtttaaatgtggaataatggagtttttattgtggtaaagtgtgccagagaactgctcatacttctgttggtgatctttgcttgcagcctctggctgcagggaaagtataacgcataacaataaaaatagttgccaacatcaattaagtattgactctgtcctgggtaagtcctttacccatccttactcagtgcctaggacaacctgggcacgactcctctgtaaaccagataaagatgctgcctcatggcccagcctcagttcagggctgtgttcaaagaatcagcagttaaggagaaaaaagttaattggaagcaatccaaaccttcactgcggtctctagagaaaataccaaacgggaagtgcattcttagcacgaagcaaaagtcttaaattttttctttcccatctctgctgttctaggtgtctatttccagcagagtgactgccccagcagcagtgtgtgccgttccccaacatccttatgtgaatcctcccacctggttcttcactccctcacctcccccgcctctggcatctactcatccctccactgccagcctctctctggccccttcattgggaattccaatattggctccatttgtccatggctttttcatcactgaatgacctcaatctgcataataatggagggataacagccaagaaagctctgccagaagtgtcctttgtaggaaattacttagaaggctccgaaagcacagaaattatttttggtggtttttttggtttttgtttttgtttttttgagacagggtctcgctctgacaccccgtctggagtgcagtggcataaccacaggtcactgcagcctcaatctcctgggctcaggtgatccttctgcctcagtctcctgagtagctgggactacaggtgcacaccaccatgcccggctaatttttgaaacagtgttttggcatgttgtccaggctggtcttgaactactgggctcaagtgatctacccgccttggcctcccaaagtgttaggattataggcgtgagccaccacatctggctgcaaagatgtttttaatactcatatgttgatggttttattccctgtacactcattttatagattagaaaactagggcttaataatactagtactaggccaggctcagtggctcacgcctgtaatcccagcactttgggaggccgaggcgggtggatcacctgagttcaggagtttgagaccagcctggccaacatggtgaaaccgcgtctctactaaaaatacaaaaattagccgggtgtggtgatgcgcaccgatagtcccagctactcagggggttgaggcaggagaatagcttgaacccgggagacggaggttacagtgagccaaggttgcaccaagctgagattgcaccactgcactctagcctaggtgacagagtgagactccgtctcaaaaaataaataagtaaataaaaaatactagtaaatacttacactgttataataataataattattattgctagctagatactgttgtcctatattgtacaaatgctaacttatttaatttcaggatgaccatattaggtaggtgctattatatccttttcacagatcacaggttcaggggcacaaatctagtaagtggcaggactggaattcaaattgaggtttgtctgactccagagaccgagctcttaacaacagtgttctttgccttttgggtcctatttctgtagccatctatgaagcaagtagctttcggaagtctaaatagaaacagaaagaaccagatagaaggatttagcaaaggaacgaatctagcattaaattccaccaccagccatgctattaaacatcaggcgattattaaaatataaacatggttggggacacgctgggtctctaaataagaccaatttacttgtgaaggaatagctaaaaaattcagtgactttctaatccactgcaaattatttaatcaataaaacacaattacttttcaagtaatctttgaaagttccaaggagtcttgaggtgtttaattgctatttaaccagatagcagcagttgagttacacagatatccatttcatataaaatgctctttgcagatggaacactctgtcaaattttccattagaaagacatattttcagggcagatacaagggttttaggttacagattaatttcgtttctctgttgttctctaggcagggcaggaggagggtggaatggctgatgcaggcatccacagctcctgccttgttaactcgggagcacgatggtcctccctgtcaataataagcaatggatacaaaatcagaatcacagggataggaatctgtggggctttttcttttttaaatatgaaatgcttcatgaatttttgtgtcattccttgtgcagaggccatgctgatcgtctctgtatcattccaattttggtatatttgctgctgaagtgaacacaggaatctgtgttctaaccagccagccctccaggtaatttttatgcacacgatagtttgagaagtactgttctaacctactgttaaaaatctttggtaaactgtagttcattgtttctcaaactgtagtatgcctataaacctgaagatcttgttaacatgcagatgctgatttggtgggtctggagtggggcctcatagttggcatttccaacaagctctcaagagatgctgatctgctggtcccagcaccaagtagcaaagtgtgtggtcagggtatttgtctggttggggaggaatgggaaggagctcaacagccctaatcatgattcctagcaccagcacttgaaaccgtgtgaccttgggtaagtcactctagcccttgaagccagcttcctcagctataaaatggtacaaagtaacactctccactgtataaggctgttctgatggctacatgcctataccttacacagtacttggcatgtagaagacactgaaatacaagctgtggttgctgttgtttttgagggaaggaagaaactggtaagtgcccaataaaagtcagttgttttgttattatttattgagagttgttgtgtggtatattaggcactgtgccaagtactacactattattatttactcttctcaaagactctatgtctctatgtattatttttttttttctgtttaacagaataggaagcctaagctcagagaggcttagtaacttggtcatagtcacaaagatagtaaaaggcagagctagggatgaatttaggtgttcctgcccaagatttttttttttaagacagtgttttgctctgttgcccaggccggagtgctggattacagtggttaaaatcacagctcaatctagcctcgacctcctaagttcaagtgatcctcctgcctcagcctccagagtagctggggccacaggtgcatgccatgatgcctggctaatttttaaaaaattttttgtaaagacaggctctcattatgttccccaggctggtctcaaagtcctggctcaagtgattctcccgccacagcctcctaaagtgttcagattacaggcatgagtgacacacccagacaactgcccaagctcttaatggcccagactgaagcctggttctgtctgtgcccacctgagtctagaaaaggtggtgagctggtacctgatgaccccacaacatggcacagtacaggaccgggggtgcagaggtagagaatgggcagcagcagacagaagcctcaaggaaggattgccaaggagcagagaaaaatcaggcacaagagaaggggcgggaccaggttccaaaaggatttagacacccagcaagcaatcaggaatagagcctacagtgatgaggaccgtgtcttctttacttctgtttcccaagtgcttagtacaatgctgaccatagtgctgcctcataaagatgtagcagctgaattaatgaattatttaaataatggattaattcatattttgagggtagcaaatgatttgaaatttgtaggtaggatgttttggagtgggagagagatgttcacctctggacttttcttttttaaaagagtgagccgttcaaaatagaacaactggaatatttcccttggagtgctgccagtgcacacaatgcctccttttcttcccaggtcagaaggcgttttgggcccagcccctcggcatgtgtgtgcagcctgcagcctgtccgacatacttacccacttgtgctctggaacacaaaggcctcccacctgccaagcccaacacaaatgcctccttcaccacagtcctctggtgtatgtgggttcagctgctgctgctgctgaaagtccccctccagggcaaaagtgaggctccagtggctccagtctctccacgactgctcagagaaagagaccacaatgctttctcaaccattgagtccccttcactggccacaaggcatgaagttcaatagcccagtaacttgaggaaagaagaaaagagacccttttctgttcaaagaccagcctcgacagattgtgtgcaatcatccatttatcagaaattcttcttcaggcactgggctaggttctgtggactcatggatgaaaaagacagggttcttttctttaaggaactcaccgtccaaaatgggaggcagagacctaaacaaggacctatgtggtgttagagaggtgtggctggagcatctcagaggatcagaaaaacatcacagatctggtatttttgagctgggcgttgaaggatgagtaaaagttaagcaggcagatgggagaagcagctctctagctagagatgaaaacatgtatggtgggcttgaagaatgaccagcaatcctggcctagagtacagggtcggggaagcggatggcggaagacagaggttggaagtcagctcattttattttctagaataggaaaccatcaaaagttcttaagcagggaggaacaagacgaaagctgggttttaaatacaactctgactgcaatgaggggcgtatgtccccagattctggactattagtagacattcaataaatatttacagaatgaacaactgacttcaagagggaaatagcaagtctggcaagcagtctggccagacttaatacctttccctaaatgctccttttatttattttttttcttgtaagagaacagaagcttttcttctcctgtactgaaccattacaaatgtatataatctgaaattgcaggcataattacataacgtcttacatggttggcagtttcatgagtgttggctttgtcttcctgactgagtttcggctccgtgacagctcaatgccttttgtgttctctcagcattgcccaaaagcatctatcatgtgctgggaacacagtaggctccaggtaagcagaacatgaaacagacttacggagcacaagagctggacaggctcctgcaattaccgagttcaactctctcatttcacagatggggagactgggagaaagagaaacatatgcactatgtggaaatgtgtgcacgctcctactactgggttcttgcattgcacagcagggacctgggctcagttaagattttcaggtactaacaccaaaggtccagacatagactgaaattaaccagtgatgaacctggccaacagcaaggtgaacagaacaccgacacacaaacaacacaggcacagaagaatgtctgacatacatgagtggtattcagcacccaccgcttattaaattatgaaaacagcgtagcctgggactagaccggacagaggcaggaaagcacaaagattaagggtgtgggctttggagtgtgtggatccgggtctgaatcccagctctgccacttaccagtgtgtgtttaggttccctaactgcgcccaccgcctctactgccagcccagcgtccaaatagctaacacgagaaaaaaacaatttcctccttataggattacacagatgaattgggatgaggtatgtaaaatgcttatcacagtgcctgcagtggggattgaaaggtcaccaaccagagagaaagcaaggaagaaagcacttggcacctaacagctgggacaagggagaaacctgaagcttagagatgtagattcaagagccatccatttccgtgtgatcaccacgtggttgggggtggggggtggtgagaagcaagagcaagcagaggagtctgaggagcacccctgaagacagtcatgcatggggaacaggtaagaaggaagagccaggatggggtacagctcagaaacacaaagggggtcagttttgagaagactgttctatgatgtcagatgctgtggaacttgaagaccatgtgaggctcgggcttagtttcaaaagagcaggaggcagacgtcaagggttgacaagatggttgaagcagcagatgggctacgctttggctgttttccagtgcaattcaggagagaaagggacagtagctccagggagggacaaggtgagctctgggaaaggcgagcatgtttgcaggtctggaggaagaagccgagggagaaggatggacttctagatgcaagaaagaggagctggcataggagtcgacatttactccaggcactgtgctaaataaaagatgcaacacatgttgaatttactcattaccactaccttaggagctagatgcttttattattttatttcatattttacaatgagaagactaggcaaagagagggtgcttacagactgaatgagccccctctaaaattcgtatgttgaaatcctaacccccaatgtgatggtattaggagatagggatttgggcagatagagcagatgaatggggttaatgtcctcataaaaaagtccccagagtgctccctggcctcttccaccaactgaggactcagaagaagacaactgtctatgaaccaggaagagggttgtcccccagacgtggaatctgccagcgctttgacccaggacttccagcctccagaactgtgggaaataaaatttattaaaatttataagccaccccgtctatggtagtttgtaatagcaacccaaatggactaagacagaggtgaaatagtttacccaggttagcagtaggagaatctgagatttgaagccaaaagctctggcttaagagttcatggcttttacccaaagggccagtctgctagagtttctggaggtgggaagagaaggctttcaaagtttggctttggcaggggagtggagagcaaagatggagaaaaacagcaaggtgggaatgaggaagtttaagccacatgatctccatcttctcaggtaggaagagatcaagagctgagactgagggctgtgtgaatggacttgggaacttacgaagtgtagatgaggtttgcaatagtcagtgaggatactgggatgagaggcagctgacacacatggaggatgccaagtagcagatgaagtcaaagggcatggatttaatggatccagcagtcccaagacagggtcagagaaatgggacagtaaagtttaatccaggatggggctgacaaaagtcaaaggagttgagagagggagattgtagggcacaaagaagggcatgatagctggcataatggggaggggcggtattttcaacatcatgtcatccataccaacaagtgcaaaggtgaggacagggcgagcagccatgatgtgttatagctgaggtttcctgaccagccccccgacccaaaggcaccctaattacaaaggtgcccaaaagcacccaccgcccatcccaaactaagtcgtcttggttcataactctgctgcccaatatcgtagccaccaactacatgttagtggctaactaactacatgttacttaactaactactgagcacttgaaatgtagctagtctgaattaaaatgtgctgtaagtgtaaagtacacctgaatttcaaagacttaatatgaaaaaatgaatataaaatttctctttttttggtactgatcacatggtgaaatgataatattttggatatattgggttaaataaaatatattaaaattaatttcacctgttttctttttattttctttaatgtactcctagaaaacttaaaatgtatttcaaattctttttctttttttctttttttttgagacaggctctcattctgtcacccaggctgaagtgcaatggtgcaatctcagctcactggaacttccgtctcccaggttcaagcgattctccaacctcagcctcccaagtagctgggactacaggcacacaccaccatgcctcgctaatttttgtattttttggtagagacagggtttccgcatgttggccaggctggtcttgaactcctgacctcaagtgatctgcccaccttggcctcccaaaatgctgggattacaggcatgagccaccatgcccggaccttcagattctatttctattggcaagagctggtccatataccaaatttgggctaaatgaatgttttaggcccatttaaccaagacgttgatctgaatagcaacagaactgataagttttgatttgttggacatgggaatggagtgccagggagctgtgacctgaaataagaaagaggtgctcactgggataccagaagcagatttttatgatgtgccactgatgggggcaagaaaagggccaaacatccaaaatgagaccaaatgtcaaaaaagcccacaagccttccagtgatgacaagaaggaccctggacctgcttccaatccaggattctccccttctagctctgcactgggccttaacttccccagctcctgtctgccccctccactgacctcaggtgacctccaaactgccccacccagccccatcctcttcgcttgctcccaccagtctctttaggacactaagcccaacaacctcatgcattccaaaaagcctctcccaaccagccagcactggggccgattacccgccccctcgccaacagcctcccctttcaggagattcctgccaacaattaagaaaggaggcaatatgatacagcgcgaccggcatggcttgtgagccaggaaatccagatcctaactcagatttgtccaatttctgctgtgtgagtttaaggcatatcacaacttctctgggcctcagctgcttatctgctacctaccactactgtcctaagtctatagacttgccagagggttcaatgagataatgggagtacaagtgctttgctaaagacgaagtgatatccaaatgaaagggaatattgtaatctagagagggaagcagaagagatgtgaaaacggaaaaggagggtgcaggaaggaggtgtcacttgcaaagacaagctgtgaatcccctccattgtactaagaggggttgacctttcctacggcaggagggcacctccatctccccaagagccagcacaggccaaagccttcctatcagagaacaccacatacctacctggcttcagaaattttcctgcagctgaataaataaaagtgattccagggaaaatgtcctaaacaaaacccgaatgcagctgttgatgaattgcttgagattttttttttcttttttgagacagagtctcgctttgtcgcccaggctggagtgaaatggcgtgatctcggctcactgcaacctccgcttcccgggttcaagcaattctcctgcttcagcctcccaagtagctgggattacaggcgcctgccaccaagcctggctaatttttttgtatttttagtagagatggggttttgccatgttggccaggctggtcttgaactcctgacctaaggtgatccacctgcctcagcctcccaaagttcagggattacaggtgtgagccaccatgcctgcccctgcttgagattttaatgttaaacagcactgaaaggaggattttaagctccactgtgaaagttataactcatccaaggttcactggccctctgaaccctcctgcaacacggtgaaggaagaaaaatcgggaatccaaagaatggaagatgttaagcaggggttgctttctcctgacactgcattgcgctctgataacccagtacccaaaaagctgctttgaacacattcacattttatttaaccctcagtagaacctttgaaggaaggaattatcatctccatttaaaagaactggcaactaaggtttggaggtgcccagtggggattcaggactagctctttctatttagtagtgtttcccattacagactctctctctctctctctttttaacacaaggtcctgttctgctgcccaggctggagtgcagtggtgccatcatggctcactgtggcctcaaactcctggcctcaagcgatccttctggttcagtctcctaagtaggtgggactacaggcatgtgccaccatgcccagctaatttttatttttatgttttgtagagataggggtctcactatgttgcccaggctggtttcaaactgctggcctcaagcgatcctcctgcctcagcctctgaaagcattgggattacaggcatgagtcactgcacctagaccacagactttctttactcagacccagacataattaatgacttgcaatatgttcaagatggagtatgaggaaaaaaacagcaggacaataggtaagccccatttttatttaaaaaattttctatacaaatatatctggatatgtatctagctctatataagaatatgtagttacatatcatatatatacagtgccaaactagatcaatttcctccaaactggtctatatgctctaaccaccagttcttgacagtttaaagtttttgcctttatatgcttctacattattttattattatcattttttaaacagattctctatccctgttgctcaggcagaggtgcagtggcatgatcataactcattacctctatatatttttcaatgtttgctgctaactggtatgatatttataataatttttaataaaaaaattcccaatagtgttcacaaagcctttcaaattgtaaaggccaccccctccaacatacacattatttagaggaatagtaatataatataacataataataatttcttttcctctcctccttttccaaattattcctaaaaattctctttgtattagtttctgtagcaattaaacacacaaacacacagaaacatttcactctgtccttctttttaagcttaaaaggataataaagtaagatagtaaacatcttacaatacaataaatattggccaagggtgggtgttttggtgtcatccccagtaaagatgccagacactgcagctgaaagcaaacaggcctacccgtcattccatctttccagatgtcctggccccaccttcacttcgtccaggttccttcccaggccatcatgcaggaagcatcccatttgccccacctaactgcttctcaacccacaatcaaaattttcctgaggagtccggtgcggtggctcacacctgtaatctcagcactttgggaggctgaggtgggtagatcgcctgaggtcaggagttcgagaccagccgggccaacatggtgaaaccttgtcctactaaaaatacaaaaattagccggacgtcgtggtgcacacctgcagtcccagctacttgggaggctgaggaaggagaatggcttgaatccaggaggcagaggttgcagtgagctgagatcgcagcactgcactccagcctgggtgacagaaagagactctgccaaaaaaaaaaaaaaaaaaattcctgaggagtagttaaaattcatttcctaatctgataaacagactataatgtgaatagtttagaatttcctttctcctcccctgtaacacattaacattctgagaacattgtaataactccacagtaagcttatggcagagatttcagacaagccagttggctgtgggaccccagccatcaccgaaggtccactgctcaccttccagccaggtgtggccatggtgggagtgactcaaggctagtgttgccagacctgattttttttttttttcaaaagaagctagacatgtagatttatgtaaaatctgatttttaaatgttgacagaattcttcttttttaaaaaatgctatgaaggtcaaacagaacccaaatgcaagccaaatgccacccatgtgcctgccagctaggccctgaaggctgtctctgcatacctctctagcctcatctccaattcctctgcccttcataaatgccactcacacctcaccccctgccttaacacccctgtgcctttgctcaccccgtatccaccctgtaggatgcccttttttgtcttttctatcagactggcaagtggcaggttgcagcttggtctctgggccccaggaaccagcattcacctctgcctgccctttgctcctggtctctagcgccctagggaaaagtgttttctgcatgattcaggctctgctttggaaggctaactacagttatgatggatgacagtggggacgcaccttccccagaggctaacaggaaagccggctggagaggctcacacaggcgcctgcatggagaggggcctaatgacctcctattgcccagggcggctgcctggccagataatgtgccttctgcagtcaggacaagagcaggggtgggaggatcctgtagagagccctgaagtgagtctatgctggttaccagaaaactcctgagcagctgcaccccctacccctcctcactcaccagccaggagcctgggccaggtgctcctgctcctgatctctctcctggtccaggttggagagaactatcctggtctcaggaggaatcacaaagaatctagccaggctgacattctcaaaagcccagccaccctctcaaaggagcagtttccagcacccaccaacactcatcccaagatcagagggttaaggaaaactctggtttcctgctaccaccaccacaaccaccacccccaaagtcaagccagggagggaacaccgagggcacctctccccagggaactcagcacctcagagaacttgcctagaaggcaacgatctgggaaaaatgtcacagggcccaaaccctcccagagaaaggcagattcctaagtcccctcccacccagacttggcatctaagcagctggggtggaggagcagggtccccctgacttctgattctcctgcctctttttcctccatctcctcccttagggaccgtcccagaacctcccttggggctcccaggggctttcaatcctcacctccaggataacttgaagaataccaggtgttttagcctgtctgggctgctatcacaaactaccataagatgggtggcttccaaacaaaagatgtgtgtatgtctcaccgttctggaggctcggagaatgccatcagcgtgccagcatggctgggttctggtggggtccctctttcagcttgcagactgttggcatctggcgtgtcctcacatgacagaagggttgacagagctctctcttctaagagcactatcccatttgtgagggctccaccttcatgacctaagttacctcccaaagattgcatgtcctaataccatcacattggggattagaacatcaacatatgaattctgggaggataccagctttcagaccacagcaccaggctctcattgagaatcccaggcagacctggtagcatccacaggcagtttagctcaataaatcctcgacacaccagtgaagtaggatcttttaccctattttaaaggcaagaaagttaacttcaaaaccactttataattagaaaggaaaaagaaaccttcaactgaaagaagactacattacttaaatttttttaaaaaagctaattttattaactagttattatgtgccaagggctttaagtgcactatctcatttcatcttgggtaaccctataatacaatcttttttgtccccattttacagataggaagctgaggatagggcagcgatgtgacttagccaaggccaggggaatttcactcttccacgggccacactgcgatggactaacaggttctccttccaggtaacacatctacattttaacaagagctgcctggagaagacaaagtagcccaaagcaatggttcaaaagcggggaatttctctgccagtgggcagagctctcagggcaggagccttttggcaccagcaagcatcacccgaaggcggccacccacaggcctggctgacacagggctccattcagcagtcggcaaagccaagggacatggggatagaatgaagaagaggattaagtcagggaaggccagccccgaggcaggcactacagcaaggcaagcaagcacctgaagaagaatgtgctcctcccctgttcccttgtccaaaatatcagtcacttaaccacgtggaatcatcagtcccagggcagggcagcaaactggggcaaaagtcctcactcagctcagtcattcaatccccttgccacccagggcctgccacctgccctctctggttcgctcctcagttgtaagacaagggggacgatctaggtaagtggtaaggtttcttccaccctcaactaatacaaaattgcgtaggagcctagtgcatctggcacttggagcagcagcattaatggccaaggtaggatgcagggaggactggagagagagggagaaagcagcaggggccaaagaaaggtgagggacaagctctaggtgacggagaccagaaaaggggtttggggggctggggtgccaagaatgggcaaattccctgaaagggggaatgaaagaaacaattcatttgcttttatcaaggttctactgagaaggcctccatgacagatgcggcactgggcactgggaaggggagaaggagcttctatacagagggacagccatgcacagcaatagcaattagctcttcacaaggccagagccaggtactatgatgagtagtgcctgctgctcatgttggagagaaatcagggaagccttcctaaaagagctcacctgagaagatggggacaatttcacccagtctaagtctagttcctcccacccaaatggaaagaactacccaaaatggcgctgaagcactagagggagaataggtaaaattaggcaagcaccattatctccatttcacaaatacaaaaactgaggttcagcatggtcatggccaggtagcagagctggcattagaacccattctgcctgactccacagcttttgcttgtaatttctattctgtcatcactcctgcagactgtatgcctgtgagtgggttaagggtgggaggggaaggaactggcgtgagaacaagcaaaggccagagagatggattggggaagatgaggatggatagtaagcactttcctaccaaaagaatatggcagccagagctttcccaaacacactcttcccagttgcctgtagtaggtttcaagaacaagtttctagaatcaggcagatgcaggctgagctcctggctccaccacttgatatctcgggtaccctagagcaagtgtttaacctcttagagcttcactttgctcaccaatacaacgggaatgataacagtcataccttattgagtagtgggtaaagatgaaacaactgctatattcaaaggtcttggcacggtgtctggcacaagttcgataaaaggtagcaaaaaaaaacacaaccactactctaataaatattgctccagtagacgctcctgtttcctggcttcctcctcaaaatcaccatggggccagtcctccacatcctccctcctcctcctttgcataccctccatttcagaacccacttcaaagctacttcttcaccagcttcatctccttcctaggattctagtttgcactggatcaagggattcatcagttagtctacacaaactccttaacctctcgggatcatcattgcgcgctaggtggttgttccagtagattgctttgcatgggattaaccaagcaatcagctcaggggctggtgggtttgtgggctgatagaattacccgatgagtcagccgtgtgtgcctgcaatttgtaaattgacctctagataacatcaaagtcttctacccaaaccacaaattctgcgcttttgcaaatttgccaacaattaaataaaatttactactccttaagaatgtcttccactaattagacagtgacagatgagtatataaaaagtcagggtgagggagggtaggaaattggggataaagcttactgacttcctgtcgggggtcttaaccttttttgtgccttcatccctttggcagactggtgaagcctatggactctttctcagaacatttaaaaatgcataaaataaaatgcatagcttgactacaaagaaaaccaataatattgaaatataattaataaaattttttaaattgtgtaatatagtaatatattcttctttattaatgcattaaataacaagctctggcagcaggtatagtaactactataaatacaaagccatcagggacataaataatatttcaaggtatctgtcgcagctaaaatgtaacatgaaaatatctgtgatttctagtggtgacaatgtcacagggactgcaaatacactgtggattgttgcctacattcgtaatacaagaaaatcctaaataaagatgctttttttcccctatccaagtttacagactcctctgaattctatacgggaaccccttggggctcttgaccctaagttaagaatctctgttagatcctttatggctcagtaagtatttctactgggcacatttctgagttccagctcacccttctctccttcttgaagaatctccacccacaccctttctgcctcaaaagttcttcacataggactctcttctgcccacccctctcatccaactggcccaaggaggacccctgccacagtggcatcccatgccctggctgcctggcacctgccaagacagagactggaganaaagcctcacttgcagagaaccagctcagacatcaggatgctctctggaacttgaagtcagcaacaaaagagagcttcgtgcaatcgtagggcaaggggtgggttggcaggtgctgtgttaatccatggcacttagaatgtaggccagtgaccagctgtactggaagaatgaccttgaactcaaactcctctccacggtatcaactgcctcaaggatgcttggcctccttccagacctgtgcttagacatcaatacagtggttcccccccaaacccctgttatctgcagtttcgctttctgaagtttcagttacctatggttaatgaaggtccaaaaatattaagacattttgagggagagagagaaagaccatattcacatagtttttgttacagtattattgttataattgttgtcttttgttattgttgttaatctcttactgtgctaatttataaattaaactttatcacaggtatgtatgcataggaaaaagcatagtatatatagagttcagtactatccatggttttaggcatccacagagggtcctggaatgtatctcccatgggaaaggaggtactactgtactgcattttatggcttctcagtctcttcctggaaccacaactcaagggagtctctgttttctgtgttacaagagccccaggtcagcaccattttattaatatagacaaagaagctgaagtttagtaaacttgaataatgttctcaggctcacggggataataaatggtgaagccattttccctttcttttcctctcactcccaaacaccctattatggaggggcaggtgggtaatgccttttgttattattttttatttcaaatcacacaaatgatccatgaaaataatctcttaaaaattcaaacattacaccgcatgttctcattcataagtaagagttgaacaatgagaacacatggacacggggaggggaacatcacatactggggcctgctgagggtgaggggcaaggggagggagagcattaggacaaatacctaatgcatgcggggcttaaaacctagatgacgggttgataggtgcagcaaaccaccatggcacatgtatacctacgtaacaaacctgcacgttctgcacatgtatccccaagctaaaagtaaaataataaatttttttttaaatttaaacattgataaaatgccctccccattcatactcaacgtcgtacctaataactgtagaccctgaccacactattatattcagccactaccgaacttgccattccgtctttttgttttgttttgttttgatttgttttgtttttgagatgaagtcttgctcttgccgcccaggctggagtacagtggcgcgatctcggctcactgcaacttctgcctcctgggttcaagcgattctcctgcctcagcctcctgagtagctgggattacaggcatgtgctaccatgcccagctaatttttgtatttttagtagagatggggtttctccatgttggccaggctggtctcgaactcctgacctcaggtgattggcctgcctcagcctcccaaagtgctggcattaaggtgtgagccactgcgcccagcctccattctgtcttttaaacctttccccaggagtaggatggctacattttccaaggcagaagggagagcggggtgggaaacaccgatgaactgagcgcagcgcctgaaaacactcagccctgctgcctggtgccctgctaggaacatccaaatcgatggcaccgagagctggcgtctccgggctgctgggcagaaaccaggatgtggaggggaatcggcaccgaaggctgctcttttatccttgtgtggagcaaattctccctatgctgtatttctctccccccttgtcatttgacgtcagagccacaaattagaaatacataccaaaggaaactctgcagacacaaaggatccttccatgcaaagggggaaaagccacagccacattaaaaaaaaaaaaaatctatccaaccaacaagttttatttacttttggggaaaaaatgaggagagtgatggaactgggatttgtgttttctcccacaatgcctgtgtctccagaaagctatttgagggggcagagcccagggcctgggcgagacagtgaagtgatccttttgaaaacaggacttctttctcttggagaaggaacgctcggccagcttcttcagacgccaccaatctataactgcccatgtatcacattcaccatctacgtactttaaatcttggacagcatttattttatcctggaaactgtgacagccctgtttttagccggagggccccttttctctcctttaatcctactttgaaatattatctgtgtagactgcaggctgttcacagaaaggcccattagaagcctcttagtccaaacttggtctgggagattggcgtcctgaggcacagagaggttatggaccagctgtaaatcacacagctgcttggcggtgaatctaggctccaatcccaggatacactgacctccaaacccatgcctcttcccacaaactctactacagtgtagcacaaagtggttagccgtctgatctccaaagacagagggctctgtgaaatcccagttttatggtcatttaatatggaccatgaccctgggcaagtcacttaacctctctgagcctcgatttccttacctacacattggggattatggcagtaactaactctaggataagggtgaggcttgactatgccagggatcgacacacatgtacattatgatattgtactgttcctgtttcacacacaatcgagtggctctgtgataactgtatccacgccatcatccagaaattggcaagaaaggattgttctcaaacccattgtacagataggaaaattgagtccccccgcccacagatgacataacttgcacaacatcagagttttaaaagtaagtatataggtggaggctgcagtgagccatgttcatgatactgcactccagcctaggtaacagtgagatcctgtctcaaaaataaataaataaaagtaagcatattctcagcactaagaagtcctaaatatcctccccaccatacctaccgaagtgcaggttgaactaggagtaaaagttgcctcttcccttccccctgcagagcagagccacgagtgcacaagcacatactccatggccctgtcttgtaaactggaatcagcacgggtcctggcacagagcagaggctcaatgcagtttcaaagaatgggtgaattcctgaatcaatgaaaatcccaatctgctaagaaaggggccaggcaggcaagagctctggtagcagcaagcaagaaccccgttctctccttagcctgttctgcaggaagaaacctttgacaaggtcaatagctgggcctctgatctcaatggtccaccaagggcgtcccccagtctggcccacatggcccaatccaggacccaggaggtaactgtgaagcacaagtgaccctcctccagctaaaacagatgtaataatattgcaggcaaagggcggtgaacaggccagggagagggcccatctgtcttcctaattgtcaactctgcccataatatttttctccctgtcacaccttaggctgctactgaactgaagcaaaaccaagatatccatcttccagccatgagcagtggccttcataaagtaccaggaacgaaaagaggctgcttggctaagagaagcagacagagctggaaggagctttaaactgcaagtcaggagcttaggaatccctactcatagccagctgtgggtacttaggcagtcatcgcacctcactgagcatccattttctgtaaaattgaagtccaaagttttggaaatgggttaatggagcagggaggtgtgaatcatgtaatattgtatgcaagatattttaggttttatgcagttggaggagagtatccataattttcatcagaatctcaaagatatatgcaataaccaccatcccctccccatataaaaaagttaagaaatactggacaggacagtttccatccaacaagcattttttgaacaccttctatgtgccctgctctgtgctaggtacttggagagccctgtttttaaggtgctcagtgtagctgatgtttgctgtgacagaagcatgtccagggagctttaggaacaaagagaaagcagcatttgcctctatcttgtcaggaagggccttctgcaggggaaaaaaccttatgtttaatgccgaagttcaaagctaagagtgcattcactgggtgggcaagaataatatttcagaccaagggtagtagtatgtgcaaaggcaacgcgtggcccaggaaccacttgaagcataattgtgctgaacatattgaaggtgctcattgcaaggggccgggaaagtgttagagccagaagtgaggctgggaaggcaggtagggcccagatgaggaaatgccatgtatgccaccctaaggaattttacactgtcagcaagttctttctagttttaaaagtctaggatgagccaccactcctagcacaaatctccctaaatgttgggcagaggctttggttcactgtgagctgaatggacattagggaatgaaccgctcgctgctcttggcaccacgagcaggcatgggctgtctgaccaaggtgcacacatggggcagtgagtccagcaaggtgctattggtctatctctctccttctccccacactatgatctagccaggggacttccaactgctcattattacagttcagaaaggaaggcactgactggaccagtcaatgggatgcacaactaaaggactgcccatttgggcccctggtagtaactcagccaacagaggctttcagttcctctaacccactctgctactcaccttaggccctctcacacgcggctacttctgcctagaaggctcattccactctctcctgtcattctgcagactgaccgactactggacctatcaggttttcagggtatctagtcctttcaaagaactcagcactggagaattctctatttatgtgagtgatttaattcctgttggtgttggccactggaatgcaagctccatgaggccagaaggtgccagttttgttcacttctgtacctcactacgttgaccagtgcctggcacagagcatttgttgattgaatcagtctggtctgatccccgagccattccccaaaactcactttccccaggtcacattatggtccagtgaagtgggaaggctgggcttgaaaaggcagtattagaacggactctgcctccattcccagtgtagctttcctgtgtcacattttgagaggctctaagcaacctgggcttgatttacccaagcaggtccttgggaatcgtgtttaactcaagatgctttctccccatgcctcagccgggtcactggctgcatctgatcctcctctggccctatttggtagataggactttgcccaggcctcagggggtcctcctccctctcctggaaaatactccctctttgccctaaaggcttgcactccagggcgcttaggaactaagacttgagtttggcagccccgaaggatgcccagggcaagagttaggttcagacccagcgtagcggccatgggctcgactttccaactcccatttctggccagtctgcggggtcaaagtacccagtcacagatttgaccttaccggagaggcagaagggaaaggagcccacaggaggcatgcgggctgggcaaagcgccctcggcggcgtctagagcactcggagctgccccattgcctccgcccaaggtcgcggcccaaagggagccctggaaagttcagccaggggccgaggagtgccagggttggcactacggggagacttttgcgacaggagagagactaagagctcgattccaggtagcagtgggagcccgcggcaaagaacgcccagtcccgcaggctgcatcccagaccgcagcgcctagctcggaaaagctgggcgggggctgcaccacctgagtcgcaaggacagcacggcctccccctcctcaccagtgttctccacccccagaattggggcgcggagagccaatctgggctggaaagggagcggcgcccacctttgggcagcccgagcagccccgctccttttctgtcgcagaccccaggctgggaggcgggggcgccaggtcggcccaagctgccgcagccactgctttaaagggagccggggacgcggcgctggggactgggcgaggcgggtggcagaggcaagaggagagtggtcgagcgccggggccaacactcgggtcgcgcagggcgggtgttgaacaccccagcagacgcactgcgggggactggggtcgcagagtcccttaccttggcgagctgcggaagtcctgcgcgaggcggcccgcggtgcacggggccggggcagctaggcgcacaccccggcttcggagcgcacgcaacctccgggtgcactgtccgcgtcccaggcgcgcaccccggggctggcgcaccctggtcgtccgcggcgcgcacaccctccaggcgccctctggccgacggtctcggccctggccccggcgcacccctgcgggcacacccaccgcggcggatgcgggactggccaggcgccgccagccgcggcttcgccccgcgtcgccagctgccaacagcgccc

SEQ ID NO: 9 - DNA, 51 bp, Homo sapiens
cacctgccaagacagagactggagagaaagcctcacttgcagagaaccagc

SEQ ID NO: 10 - DNA, 51 bp, Homo sapiens
cacctgccaagacagagactggagataaagcctcacttgcagagaaccagc

SEQ ID NO: 11 - DNA, 159666 bp, Homo sapiens
  misc_feature (159166)..(159166): n is g or a
aggtgggaggaaaccgcctggagccgccgggagtggacgccgccgaggcccggagtcgcgcctgcaggtgagtcgccgcgccggggagggagcgcatccctcgctgcagcccgggccgggacttggagccggtgtcgggctccagaggctggggctggcggccggggcagcgtccctcccgcccccggcccggaatgtcaggtgcgccgcgggccgggcgcgcgggtggcccaccgggcgggggcgcgatgacaaagcacaaagggactgcgcgcgaccaccatccgctcggcctgcgccagggccagcgggcttcaggagggggacgcgcctgtcccgggctccaggctacgggcaagaccacagggctcctgacctttttcggcatacatgtcaccagtgctatctggaatgtaggtggacactgaggctcatctcctgagaatgaatggcctttacccagactcaaggggaggcgtggaggggccccgcagtccaggggtccgcggagtggagcctttcgagggccaccgcagcaaccccctcccatattttgggaaggctgggccctgcgcccgttagccaaggttggactggtgttccctgcgaagtgagggacaggtgaggggcgtgccctctgcagcaaaggtgtgctcttccgaggcgcatgatggctaggatggtctgccgctaccaggcagtggttgtaaagtaaccccgaagtgaccctcatctccctgggtgttcctggggaaggcccaggtggtgacattgactccctgggggagcaacacactcgacccattttttagtggaagggaattggaaccccactggggatgctggtgccctggactcccagtttagtacccagggagggccctagaaccagagcttctggcctcgtgttccttctctgctgtccgtaggtgtgatcccgggcaggccacttaagtctccctgtgcctccgcctgtgcaatggccgcgctagtaccctcctcgggggagtgttgtgaggcttgagtgaggtgagccttgcaggatgggccttccacggggcgtgggccacagcagaggctctagtcccagttgtgctgttggcagtgtagtgattggcagtaaaacttcctttgccaaggatctttttgatagttttcctggtggactcaatgtctgaaatctttttgcctggcaaacaacttgcctttatttctcccctttttgttaatcagacacagcatctactcagcgtgggtcacctctgtgaacatcactgactgcaagcctccctcaatttctggtaaattttttccttcaagctttttgaggtcagggggaaaatcctccacagatcttcacgagtctggtcccagatcactaacagctaaaggttttgtggtggggagaacttctgtgccacttggcttccattagcctgcccaccctgaccacacaatgcaggtgcagcccatcagggacccacagcgcctgggaggatggtgcggatcttggccaatggggaaatcgtgcaggatgacgacccccgagtgaggaccactacccagccaccaagaggtagcattcctcgacaggtaggtactcatttcctgtggagtgggacagatggcctcctgtgtactggctactcctagcttccagaagtctctcttgctggtcactaaccttttctagcctgaagccctctttgcagagagctggggaagatgcagtggcttattgtctacctccccagatctcctttctccaggcgcctccccagacttcacagccaagagctctctctcctttaacttggttagcaaacctcactggagctagcgtctttcttttaagagtgggttggatgacagaagctggagaggaagtggaggagatgagccctgggcacagaataatcattttaaaggggtggctgggcgcggtggctcacacctgtaatcccagcactttgggaggctgaggtgggcggatcaggaggccaggagtttgagaccagcctgaccaacatgatgaaaccccatctctactaaaaatacaaaattagccaggtgtggtggtgcatgcctgtaatcccagctactcaggaggctgaggcaggagaatcgcttgaacctgggaggcggaggttgcagtgagctgagatcgcgccattgcactccagcctgggtgacagagcgagactccgtctcaaaaaaaaaaaaaaaaaaaaaaagaaaggagtgatgatgagtattaaaaatgctggccctagagccatgccctgtagtccaacctgcctcaaccacttcctctctcctctgtcctgggcctgatgtgaggaatatagactggcatgttctgtgctctgagagcttgtgacttggttgttgggattcttatgggtggcatgggggattgctgagaaaggagggtgtgaccctgggtggctgtaggaagggcaggatgcagcctagagaggttgattcctggctggtgcgtcaacccaatgattcattcatctctctctgtcttcacattccagagcttcttcaacaggggccatggtgctcccccagggggtcctggcccccgccagcagcaggcaggtgccaggctgggtgctgctcagtcccccttcaatgacctcaaccggcagctggtgaacatgggctttccgcagtggcatcttggcaaccatgctgtggagccggtgacctccatcctgctcctcttcctgctcatgatgcttggtgttcgtggcctcctcctggttggccttgtctacctggtgtcccacctgagtcagcggtgacctctgagggctgataggggtgggtttgttgagagggacttgctgggccttggtgtgagagcaggcatatttggaggggatctggtggtgccttgaaggtatgatcagagaggggaccacaggtgtgtgtttcccctttgtgttaagcgtgaggcagagggagacgttagtccagcatttccaaagtgtgggtgggtccgttggttcccaagatacttttaggtggtatggggcctgcattaagtggcacaaaatcagagcaagaaagcgatgcccttcccaattctctcaatccttttatgccgagaagatctcagctggatgccaacatgttccgatgcctgtggaagacatgccgacgtctcctctgcctagggagcaggacttgggcttagggcaggtggaaaaaattccagacttttttagcactgtttttgttttaatggtatatttttattggctactttattgtttaggacaagtggtagtggcattctatttattgtgaccttttcaataaatagatttaagtaaaaatgagtccatataaagaaatgtatgaataatcgtacacctgcatgcagatccggaaaacatggtaaagagggattgggttcggggaacaggcagcagcgagcatttgacctcagagggtggtttctaagattttctcagtaggaacgcagaactaggagagaaggtctagatgagatctggcttggaccccttgcctgatgtgtggataacttccagcctcactctgagatgccaggcatgatggtcagctttgtggggagggttcctctggccagaatggctggtgaggctgcagggtcgggagagctggggtgcaggtccgaggtctcccttgcttaaggagaccttcctgaccagaggctgctcagcctctttcaccctccagaggcttctgtcacccctggctgcagtgcattctccttagaaaatggtgcatgtggaatgaggatgccctgcttctctggagaggaggccttgcgttttgacatgtgagccctgggtctgcgtggaggccctgcctggggaggcactgggtggctgaggctctgggccacagagggaggagggttatttatgggttggagggaggctgggtgagtcaaggacttgcctgtcctggcaccaggtttctcatccttttcttgggatccgctgggtttggttgtttgcagggaggaaggcatgttttggagttgctaggtctcggggaggatgggcgctagaaggagcttgaggccacccctccatctgagagcctgccatgctgtctggaacaggagcttctcacctggggcctggacaaagagaggtgggggctcagccctgctgatgtcccagctggcccccgtggcatctccttctgtcctgacacttcggcctacccacttgcctggctccaagcccctacagctccagcccgccagccgcagggaagttcctggccataccccactctcctaattctcttttctctcagcttctcttaggggtgggttttccctttcattttccccttgcaaagctgcagaactctgaaaaaataaattatgagtggaaaaccccaatatataaaataccttgaggggatatgaatctgagtcctcaaattcagggctgataacaatacctttttctagaactcagtttccattcccaacgtccaagccctttgagaattagggtccgttagagaaggcaggggtgagcagggcttccctctgcgcctgactagaaagagcgggaggagagaggcctgcctggctttaggcaggatggcggaagtgggcaggggccacagtgggcagagatggcttttcctgaggcttgcttggtgcttagccggcctaagaggcagggctgggggctggaagtcagttggtggggaccaagaggaggtgaagtcttgccctgtttgttgactgagctccaggccccatagagctgctgtggttggattggactcttggcctttttctgagctacctgtcttctctgcctcacttcctaagcccagtgtctgaaaggtgctggagacagaggcagcttagtgtggggagaccccgctggggtcctgcagcctgcagctgggagtggcctggggccatgtgcttccagcctgcctgaattcccccagcaggtctctcacctgcacctactgacccaggcctcaccgggcggctgcaccctgcacaggcagagtctaggtcctctgggaggccagatcagagctgaggggcctgagtgagcctctgcctcggtctactcagcatcctaatcagaagctcactgagggggtgggatcttccttctctgcccaccaccaactctgcctgctatgtgacaggacccccagaatgagctgcctgactcgttccaatcctgcccaagagggcagatttccagggaggtttctgctgatcctcaaagccctgtgtctccgtggcaggctggatttccagcctggctgcctggggagagctgctcctactcccacccacgtgagccaccagctcagatcccactaggcctccactgcctctgcggggccacccggtgagtagaactgctggggtctgacttgtctgttctgctcaatctctggggaccagctgccctcctggtgccctccacaaattccaagcccttggctccctaagcccctccctctccaccctccagctagtcctggaagtggggactaaaccatcatctccctgaaggagacaccaagcctgagatcaggtgaaacagtgactctggttttgccagttcccccgagcagctgtctctcagctcctgcctccctgtgacggggccttttagcataggtgagggctggggatgttgggctccctctctggggcctttctagctccatgggtctgagggggaagccctgaggcagtggtcaaggcgtctgtccacttggatgcctgaacctgaggacaggggaggaaagccgcccctgcgctctggctcaccgggtggcacaggaggcctgtttgcaggcctggctctgctctttgtggacagttcactcagcctcttgagccttggtttcctcatccctgtgaagggatgatgatctgggacctgcccgcctctcagagcctttcaggggatcactgaaagcatggtgggtaggaggtgggcagagggccgtggagagggggactgcgcctgcccctgagctgcctctgcaggtgctgcaccatggcccacagcttctgtactggcagctttggctccagagtggctgccttgtccaaggcacctgggatccctggctggggcggtgctgggcttttaagagcagagttgcccctcccgcagctgttagagaagaaacacagccacttcgctgtgctcctgaaagctgaggggcttgttgctggtgttgaatgtcaggactggatgctgtttgttgagagtgtatggagtgcctggccctgtgctaagcacgttatgtcatttaattgtcactagcaccttatgacataaatattgtcactgtcatctttatttcacgacagaggacatggcagagggtttataacttgctgtaggacccagagcgagctgggtggagctaggattcagagacctacagcccttgctcttgaccactcctctcttttacctctggccgtacctgcatcagcatcgcctagaaacctgcagatacagatgcccagctgtactacctgctaagacctgcctgcagccccatgagatcagctgtgtgggggcagagggcacagaagttggtgcaagggtgctggctgcagctgcccagctgggtggcctcagtggcttcccagtcctgggtcacagtcatggagatttagctctcttccctgcattcccgaatgcatattttcattgcaaagtgacaaatccagtgatctctcaaagggttaagtgggggcaggggagggaggcagcagagctctgctgccaaaactagatagagaacctgcagcctgcccagccagtaggacaagcaagcctaccccgcctggtgctgccacccagtgcccaaaagagcagcaagagaaagttcaagaagcaggtagagtgagagcttcaaagaattacaaagggggtgtgtatggaggggtgtatgtgtgtgcctctgagcctctggtttgaggctgggggcagggctgaaaccaaatggctttagggactcagagtttggaaggagaaggttggagctacttgagatgaagctggagggccactgccccaagtgcccaggcaggtggggcacagggctgggagccagggctggtctgcattggcccagcggccagctccagtccctctggtgggcgggggccctgctgggggctgaatgcctgcttcccattcccggcttcagctctgttaaccagaggccttggcacaacccagcatctccctaaacctccgtgtcctcatctgcacctcccacagtgagaggatcaagtacattaattcatgggaagcacttagccgtttctggcacaagttagtgctcaatgttactgtattcacagagaaatggtattaggactcacttaacatttttttttttaacagcagctcacatcttaaattaattttttaaaaggaagcttcatattactattgtaaatggaaagccaatactacttgccattcacagtaggtattcgtacaaatgaatccaggacaaaacgaatgatattccattttagctagtcactgccattgtccaagcccttagcctgatgcctgctttctttgttaaaaaagtcagtttatgaagattgggagtggtgcagaagcctcactggcccctcactgagacattctcctcgatggattcagaggactgaagagaaacaaagaggaatgacttcctcaccatccgattcggtgctgtgtttgtaaattgcttataatcatcttgtgcaccaccccaaatcatttcactccctggcgggtaagagtaccccacaactgcgggaaacatggtatgatcttgagcaagctattttaaaagtcttactctttgtaaagtaatgcattcgtgtggttcagatgatataatgtacaaatgtatatagagaaaagcctttctccctcctctgtccccatccatccatccctcctccactccactataactactgttcttagtgtcttctaaatacttccagaatttagttatgcaaatatgagcaaacatgaatatactattttttctttttttatacaaataatagaaaaatttgacacgtttttctctgccttttgcatttttcacttagcagtgtatcttggcacattttatatgagtacatgaagagcattttcatcctgcagtattttggtgtttgagttgtcgaccctgtcttgggctcacctgtaccatgggggattgactcagttgaccctcagggccttgcagctctgaccctgaaccaacccatggggtttttccctgaaatgtggggatcttgacagaactgtctccctttctccagggcccaaggggagatatcacaaccttatagggtttctcagtctcctttgcagttggatagggtgcaatttctgccctcatctggctccttgaaaaggcgcagtggcctcacctgaacactgcctcctgggtcacactgcaccctgagacgagctgagagggactccccacaacctctgacaggcagggagtgacccccgcctggcctccctcattctggaaaaacaaacaggctgggctagacttccacgaaggcccctttcagctctgagaccgacacctaccacagagggccttgcccttagtagacgcttgatggactttgctgctgcctggcctggcattgccaacgtcattgtccaacacgttgctgtccccacttcctctaacaccccattttctttcttttttaaaaaaaattaacttttcagttcaggggtacatgtgcaggtttattgtataggtaaacttgtgtcatgggggtttgttgtacagattatttcatcacccgggtattcagcctagtacccactcattatttttcctgatcctctccctcctctcatactccaccctctgaaaggccccaatgtgtgttgttcccttttatgtgtccagtaacaccccattttcatgaacatctggattaaggaagttaagaaaagccttgaggagagaccaagaccccagctttcttgctctgaactgggtaatgaactctcaatgcccttttgcagggacctgagggacccccaccaccttggtgtgtagactggaaaggttgtgaaagttgtctcatggcgccacctggtggaatttttggacaggagcaggaactccctcctgcaaatatactacaaatggattcatctgctctcctgctcccggttagtgctcacctcagccagcccaggcttggtattaccttgtattttggaaaggtttctggtggagagcatgcacaattccattataatttctcattcactgtggtttcgtcctgggttgagcctagtgccgggaacattcataagttttgtttcatttcatcctctcccaagcaaagaaaaatatatgtccttcctttttcccagagtaaaggaatttatatgtggccacaaagttggcaggcagcagatctggagcctgcctcgccagcctccagcaaactgaatctgggagccctagggagggtggaaggtggctgtggaacccccagggagagggtttgtcgccggggtctagtcttgaaccagaccttccagtatttgagttttcagcctaggagacagagtgagaagttttagacttggtggcccagggttgctgtgatcatgttagtggaaggggcttgcttactgtttaaggctgcactctctctaggtgggggtggctatgtctagcccagccttacccagtgcagcacccaccaacgcctcacacttgcctgtccttactcagagcctggcgccaggtggttcccctcaatgaacgtgatatttgtgacatggggcccattgcctagctcttgtctttttcactggaggcaagaagcaggcgagtcagacaggctccccatttggtagctttgggcaagttccttactgtgcctcatctgtgaaatggggatgacgtgtcatctagggcggtgttgagctgcaattggaagacgtgtatgcagtgcctggggtgtagcggtgtgccatggatgagggtttgtatcagatcacctcctacagggcccattagtgaaaattgtctgccctcagtcaagaaaatgtaaaatgcaatttgctttcgaaattctgggaggaaaaaaaaatagaaaaatttcccaatatgtctgcttaccagtatcatgcagtgaagacatctgcctctgaggcatgggcctgtgtgagcacgcttgtcagtctatgagggggtgtgtttgttttttcttttttgcagctttgagctcagctaatcctgagaaatcactttcttctgatgaagtggctaaaatctggacgctgtcagcaagggaacatacaagccaaccacaagtgcctccaacagcgtgttccttttcctgtgatagttgttctcaacctagcaacaccaccagttcatctgggcagctttaaaacatgcagcctgggttccagttccagagccatgagccagccttcctccaggtgggagctgccctgtccccggggagcagggtttgtggctccttccctctcacatggcagactgagtttctgagggcagggatcatgctcagctcttttttgtattcccagtcccagacaggggccctggccctttgtcaaaacttggggactgctctgcaaactgcatgagaaggcatgaggcactagcccaactaaagggaggaggggaccccaaaaacagagcccattcttcctgccttgactgggttggatcctggtgacttctctgtcacctgtgtactcagggacattattctcaagttgtaagtgcaggtagctctaccccgcagcacgtgtgggatgaagaaggaaggaagaaagaaaggagggaggcagggagggagggaggaatgaaagaacctaggtcaatagtataaatgtagctctgagccgggggtcccaaggctccctgtgacatctgcctgtatcccagcctctctttaaatgaagaagcagccttccttgaagacccaccaggtgggaactgctgcccactccagaagcctggggagggtttctctcaagactgtggcattcgcgcttctctctccctcctctgctgcacttgcttttccttggagtcaagtgacaggtcaggcccagcccagggtgcagagggtgcagtgaccctgggacacatggatgttgtgggagtgactcattgtggcctcacagctcaggaagggggtgcatgtgctgtctccttgcctctgccttattccaggggagttagactcttgccttttgctcccaagcccttgagaaaccagggctggatctacttgggatctaactaccagtgccctagttatgcaggagttagaaactgaaatgccctcagggaccagataggtgccagagaaccgtgagaagcagctgggtcccaggcaccagggaggggtgcggtctgtggaggactgggcggggcagaccccgctaaaggcttcatcgcgctgcacagcacgttgcggggtaaggctgccaccactgcagcagggatattggtgctcctcctggctcacagcaggccctggggtctgtgttctggctcctcctcccccaggagctgcgtggtctcagggaatttagctgctctgctaagcctcagttttctctataaatgggggaaataatgccccctcttggggttgacgtgcaggaaaaggggaagttttatattccttatgtattccataacatattcttgatatagcacctctatttgttttctatgccatgtcacaagtcaccaaaaacttagcagcttaaaacaacacacatttagtatctcacagttcctgggcatggcttagcaggtcctctgcagagctgccaacagtgccagtcagagctggattctcatctggaggctcgactgggaagggtccacttccaagcttcctagaaagaataagctgcgctttcttgcaggtataggactcactgcaacttgtttcttcacagccagcaacggagagagactccaaagctagctctggacatcccctcccctttgccgtgttctgttggttggaagccagtcacaggtcccactcaccaggggaggggatcacagaaacgcatgaacaccaggaggctgggatcatggggtcaccttaagtccatcaaccatagcacctgatagcttgatggccacgattacaattgattgggtgcctaccatgtaccaggcagggtgtagaggatttcacacatattatcccatctatttaagttgttgtattgataaacttaagactcagagaggcagggaacttacctgaactcactcagctgttaagtggcaggatttaaacccaggtccctctgctccccatttcttgggtcttccttggacattacactcaaggccacagtcagcatcaagctgtccctgaggagccctccaacaccttaaggtacttgtttcagaagtcacttatctccctgggttcaagtcctttaacttgttcaatcaggccctgtccttggctgctgagtctctgtctcaccttctttcggctccgtcctcagacgtctctagaaatggttcaagcttcttgtcccttgatttgtctgtccagtgattcttctgtctcctctcaactccttcctgcttaatcagcgaattccacaaatagccactgagactcccttctataggaaggccctgtgctgggtgctgccctccatcttcccccaaggttcttacagtctaatgaagaggcggtgtgtgcaacactaactccacttcagcagttcagtgaaaacaacaccatctttagacaatataaaagtcattttctccctgtaagttaggagtagagaatacagagggggcttaggtaccttcacaaggttatcaggaatgcaggcccctcatccagcacctgtgcctcatcgttcaagatggctgcaaagctccagccatcgtgctgtcattcccatcagcaggaagaagaaagaggtgaagacaaatcatccgtgaccacccagacgaggtcagcttcctggtcatatgctcccttggcgtctttgcttcctcatcacaatgcagagaaactcattctttgtgtccttgtttgatgtttattcacgactctcccttgcctcccaccaggtgagaagctccatgaaatctggcctcgtgtctgtcttctttgttgttctagtcctgcggtccaccgcagtgcttggcatgtagtaggtgctcaataagtagttactgatggaaggaacactcaagattgtactttaaacatgctcttaatattgggatgagtcagagttggcctggcccaaatctggaatcttctgaattggagtctgtgacgatgagtgctgctaagggctgtacatacatgaccttgcttaatcctcagcagaacgctgagaggaagattctgccattttcttcaactagcagatgagaagacatcatgagattgtggaactactaacggaaagctgtgatttgaacttggctctccaactcagaacctctattcacttacctagtgactttccaggacaccagggtgaccacagtcccctctagacccccctcctgcagccctggctggctcccttgattgccagcaggcagctcagtagccgtgtgctcagtcacaggtgctgaggaagcatcgtacacttggccccttgtcctgaagtggggcttcacctgcagaaaatggaggaagggcaggaggtgccagcatcaactgggagaatgccagttctccagtgctcctcctcctctagccgatttctaggagccttgtggtccaggggttctttcagactacagaggagggcaggtggggctgccgtggtctaggaggagggcaggggcatgccttgcagtgggtgctgtgtgtcctgcggcttccatttctgcccgcttcttggcggggcctgcctgataaggggaaggtgataggaaactgatacccgcctgtgctgggcccccttgaaccatgtggggcttacagagcccccgggccatggagcggttctgagggacactggaggaggggttctagcttctcccctcagactccacagaataccccaggtagggactagattctggctggagtcaaggcactcagacctctgctgggcaatttggcccaagcctctgttgcacagatgggacactgaaggccagtgaggcaacgggcttgccaagatcacacagcccatcagtgtcagagctggtgctggttctctaaactggatgcgctctgtggcttctttgactgaacagttcatctggcccacaggccatccgaagggcgtttggtggagggtcctagtttgacgcctggcttgaagagcggatccctggctctgctgtggaggtcctgctgggaccagccatttctgatcatggctgccagaaggtggcgctaggcacccagctgccacttaatttccagaaaaagagaatggcaacccgggatctgggtgtaattagggcaagaggccagctttggagctcagcttccaatcaccctcccgcccgggcatgcttgtgcgtgggcacccaggggcaggggagggactggagaccgcacattgggttcctctggtcccagaccctttggaaggttgcagtgtgggcagtgaatgggcgcccaggtgtgctccatttactcatcttgactagatgataaccagagatggaataaaagcagccaggatgggtgggtgcctctctccaacagcaagactcagcctgggcctcagctcaggccttttcacctggctcagctccccggcacaccccctcgcttggcacagggcacttcgtcccctgctggggaagggccagagagctcaggatgcccctgagagaggctgtctcattcctgggaacttcccctcctcccttcacctttcctgcgctctctccatctctccttcctgtcctctcccctcgctcatctctcctgccccttcttatctctttcctcacgctcacctcgtcccagttcctccagggaccctgcaggtctagcccccacccccagcacctcatctgcagaggcaaacagggaccaataccagtgagtttctaggatgtggtttccatggtgacggtacatctcctgcctccttggtgctcagccctgggcgggttgccgtggatactctcacctcactgaggagtgatttgtgggactgtttttcttctttacttcttcttcttctctccagaaattccgctagcccagacagcgttttccccactcacggcgaacctgaagccttctccaaagggcttcacacccagggccactgaggcctggaaagcattttatttatacgaggtattcctggtaaccttctccgcctttcatagggtgcgtgagtggtcaccacagagaaacaggccaaagctgacccggtgcccaccttttctgcccacagtgtccttccaggcccctgacttgttccatgccgccaatgcacgccaaccctcagagcttctgctcggcggccattttccttaagggtctttggagaaagagtgagagtgagagggtgaggtgggaataacgagcaaagtgaatccaggcaaaagaggtaggttagaagagggagaagtaccggaaagggaggaatgagaggtgggcagactgggggagctcgaagggagagggagaggtggagggtgaaagttggtcaccagagaaagccaacccatgagtccgcagcaggagtcctctggtgttaatgccctttataaatcactccgcagccccaaacccaaaacaggcctcttctttctctgcaaagtagaaaatgtgttcgtcgacataaaaacatgttaagtacattgtggccctcgttccccccaagttgaaagccattacaataattaattaaggcaggagattaattaaagagtcgtttccccccattctccctgagtagatcaatcaggaggcgggagaacatgtgctactcggcagacagagaaggggggctggaggggaggccgaggggcagcaaggcagttacagacacagctagagacaaaggacttccgtgctgggggctgggggctgggggctggggctgagaggagctggcaaggaggcccccaggagggagagcttgctctgcttccaaggacctgtgatctggcttcccttcttggtgttcacagcgtgagggtcgctgtcaccatggaaacaggcctggggacaggaggaatatcagctctctgctcctggactcctggattcccctctgggagtgagagttcccagtgagcagagttgaggccccaggaggcctttctgtggagtggcatgagggttggtggcctccccactcccgtgccaggcccaaaaccaactccacacgagcattgtcaggctgatgacaagcctgaaagttctgttcctcacatgtgccacactgcagacaggacagactggtatgagctcaggctgagaatcatgagtcttttaggtaacttttctcattttgctaaattttgagttcttaatgattgctttctccctttcactctccctctctttcactctctttcttcctctttcttatgcctttggccaatctattttccagctgaatttcatatttctaagaaatgtttatatcatgtagtgtgtttcatgtgtgcatagtgggtttaacccattccaccctgtgtctccgtcttgcttacttttgagccttccagaacttcccgattgatttgttcagaagcactgctcttatgtttctctattttgtatgatatttttcatatttctaataaacattataaagggatggtgttccatagatgattccccatgatatccctggtatcgtttcctcctttctgttgttttattttaggtttttgtatctttgtgcgtgcgtggacttagcaggcagttagcttttcctgttgagaggagatggctcagcagaggcgggtgatgagggagcagctcatccagcacctactctgccacttacaaagtgtaactcagaatcatgaagcggcgcaccttttactcaccctgtcattatggatgggggcttaataggcactaggttttggaaacccatggtggacaagacagatgtggtccctgccttctggggaacaacagtctggtgggagagacagacatcaaacaataaatacacaaggatatagctacaaattgtgaaaaataccacgcaggcaaaacctaggttctttgatagagaacagcatatgcctactttaggctaggggtcaggaggaggtgacatttacactgcagcagaagccagccagacaaagtgtgcagtgaagagtgatggtccccagcaggggtggagccgtcggaagctgatgaagcttcagcctgggggcccttcggtgcactggagcctcacaaggctctgggggtggccctagcaataatgggtccacatggtcacatgtttttgtaaaaattgtataaagtactttaactgaaatcagttaagagcactgacaagtggccaggtagggaaccactgggacctggctaagggaatgctgagttggggagtctatttgggtttagggagatgtatttacatgctcgtggcactgccatgtatggtcaaggtcaaggtcaaggccatcgtggggtgggaatggcttccaggcacattcttcctgcctattgtgctaggcaagaaggtgcagtgtttggggttgacctgagcaggcccttttgctggtggggagtgtggcaggtggggcatggaggagcatgtggctgggaaggtgcagaggcagattcagggtctggaatattgttttgaatttcgcgaagtttgtggaatttctcagctccttaaatcttgttatttgtttggacttctctcattctaaacaagttttcacttttatgcctaattttgcttttgagtttctgaatttcttttttgtttttttttttcttttccagagacaggcctctctctgttgcccagactggagtgcagtggtgtgatctcagctcactgcagcctcgacatcctgggctcaagtgatcctcctacctcagcctcttgagtagctgggaccacaggtatatgccaccacacccagctaatttttgtattttttgtagggatggcattttgccatgttgcccaggctggtcttgaactcctgagctcaagtagcccacctgtcttggcttcccaaagtgctgggattacaggtgtgagccaccgtgctgggccctgcatttcctttttatggaacctgggccctccacccttcagcagggatctgggctctgcccctgtctgctgagcctgtcttctcctctgtggctgaatggtgctcaaggggacgtcctcggggtgggattggctgaggccccaccctggaggcttctggggctgcttccaggtgtcaccatttccctcacctaggagaggtggggccaggaggcagacagaacaggccctaggcccaggaccagggccagctgtttctccttggacacccggcgcaccctgtgcttagagcttttcagaactagcattttcaaccctctcttctcttcctctacccccggccctcaggctgcagtgccttgaataatcccatttaagaatcatttggggttaaggcatcaccttctccagttgttttctttttctttttctgttttcttttgagatggattcttgctctgttgcccaggctggagagcagtggcactatctcagctcactgcaacctccacctcccaggttcaagcgattctcctgcctcagcctcccgagtagctgggactacaggtgcgcaccaccatgctcagctaatttttgtatttttagtagagacggggtttcaccatgttggccaggatggtctcgatcttttgacctcatgatctgcccgccttggcctcccaaagtgctgggattacaggcgtgagccaccatgcccggcgaggttttcttttttaaaatagccagtgctatcactcagtgtttacatattaaaatatgtaggtgatatatccagtggacagagcaagataaaaatacacacataatttttatccacaatacataaaattatcccaaaggaatgtgcatacactgagaaggatgggtgggaatccacagtagcatagaaaggccttgtgggttgcttgtgttttatgagtatgtgtgtgtttgtgtgtgtgtttgtgtgtgtgttgaggggagcagtctatggggataaatgcaaagtagcctaaagaattttccaaagaaaaatgaaagccccaacaggcctggctgtggtggcttctgaagggggacccaggcctgcttggatgaggggctcagcaggaagcctgaccccaccaggtgccttcagctggctcccctcgggccaaagccccgacacaccaccaccccacaggacaaagcctggaactgaaactggttttgaaaagtgggatttgtacacagccccagggaatgcagcccatgcccttcactctcattggctgttgcccagtgccgtgctttcctgtgggcgaggacagggttgagggggagatgtccctctgaggttcttgaagttctgcctgactgcccccactgccctccaatgactcccctccagcctgagtttcctccccagccacggtaggagccctggagccccagagatgctcatcaaaagcgtgtgcagtgtacccctttgaatccccctcgccttcttgttcagaagccccatgagtaaagcagacagaagctgagctgctgcatcttagacaagtctttgaggggtgagggtggctcagtggcagtgggtgtctgagtgtcacccctctgccccaccctccactcaaagtcaggaacatggaccttactcctgttcactttgccctgaaccctgcctggagtgcaaaatgcttccctctccttccacatctccctgcggctcttgcccttggcaatgcctagaaagtgcagaggagtgaggccacctgccggacatcctgcagctttctcctcaaattccagctgcctggctcctaggataccagtgctagcttgcggccccttccttggggctatgactgccttgtccctccttgtttacacttttcaagcggcaagacaaagattggttgaagagtaagtggtgtctacagctgccttgaagaagagcaggagtgtgtcttggggctgcatgctactcaattcctaacaatttcttatgttctggccctatttctactggccagccctggggggtgggggtgcagtggggagggtaggttgaggaataggagcaaggggttacacagctggtctgtgcagggaggtctggggggtagcccactacagtctccaggtccccttgggcatgtgactgagcacttccttggttgatggactggctgaggcctaggagccagtctcgggtcctttcttccctcatggccctaggacaggcctgatgaggctggtggggtaggggcgaagctgtgggtcttcggccactattggaaccctgtggactagataaagaatgtagcaaaggagacagtgacatttggccagccagcccgtcccccatctggagaccccccatctggagagtatgtgatgagctcacgtcccctggggtttcttccacggtgggaagaactctttgatccttgcctgaggctgtttttagtcccagagtccaagcttgtgatgtgcccaacgctgggtttcctggggctgccccaatgtctctgctgcatggatgccgtgattgggcttgggagtaaccacatttatgtcatccgccaccccggggggatgtgggcatctggaggaagctgcaaacctccgtcccacctctgccgggagcaggaagcacaggcagtgaggcacctacaaacccgcttcctggagtcatacttcatttcccaaattaagaaatcacgcaaggaaaagaataagcatccatgttttaaaacaaacaggaagttgttatggccactttgggcagagggacgtctatgtcatgggagtcctgcatgggcagctttgtctgggttttgccattgaacaagcattggccgaatgcctgtcaagtacgaggcctgagaaaagtcctgagactggggcatatagaggtcaataagtggtggttcttgctgtcaccatgttcatagtctaatgtgcgtgtgacaacagtgcagggaaagcaggaaacagggctcctgggggctcagagtcagggtgagcagcctgcaccctggggactggggaaggtacactgggcttttctggctgccacgacctgctcctctgctttcgtcccagggccctgttattccctgaggatccacctgtcctgcacaaagcccttatgctgcggacgcagcgaactctgctccagcttctggtagaaatggatcccgctgggttcacaccagccagcatattccattcttggcctcggccactggctcctgggtggacatgtggttcaatcagagtgaatctcgggacatctgctttgcctgctgagaggttctctctctcttgtctcttgtctctgtctctgatgtgagagatgagcatgtagtcaagggagattctaaaagtcaccttgagatcacacaggaagtcagccttatgataaagataaagccatgagaagcagaggtgaaacaatgaaactaggtccttggtgacatttttgagcccctgggtcaagctgattagcagcggcgggctgctcggagcggctgctgccattgcactggctgcagcagtggggtgcaggcggtggccacaagagcagatgtgggagtggcagtggtggcagtgggatccctgtgccctgcatcccctgtgccccccatacccgaggcagctgactgcacctttctcacagttgtgtggctgagtgggacccactgccaggcctggagcctccgccgctctggactctgcctctacattgccactgtcgcccacttctgctgcagggaggaggcagacagtccctggagcctgcccctgggagcctcccagagtccgctgccctgggggccactgcaatggggccgggcagagtcacctgatggtgggggagcagcacagttagaggcagaggggccagcagagaggggccctgaggcagacctgggcccagggtagagctggcaggagccgggcgtggctgcagctgcccaagttgttgctgtggacctggcctccccatgcttttgggggccaggagcaggcaagagtcctgccctcctgggcacagctgcagtcgcccagctgtgactgtggacccaggcatctctgcagtctctggtgcctaggaaggcccccccttatccctgcaggcttgaaggtgtctgcttccactgcctggcctctccccactaccagcacccactccgatctcagagtaaggatgggaccaagcccggcgctgtcacagcccagctgggtgtgcacacactcagggtagtgctgacgtgccagccccctgcctcctcagccctctctggactttgggcactgacaagcacaagaaagaggctgagagggtgtgaggacagctcagcactggcctgcaggcaccccttggtatgaatggcctgggtgccctcagcaggggcaggaggcagacaggctcctgggcaaaagagggtgggtccccgatgaagacacaccttcaagctggggaggtcctgaagccggggggctgggccaccagtcctgtgaaccagaggggcaaacttgtggtgcttttccttgggcctgcccatggctgcgcatggatctatcagcacacatttcctcccttctcaagcccataaaaaccccagactcagcgagactcaactagaagatggagagaggatgggacaatcagctgcagagaggagctatcctctctgctgagagctgaagagacgttgggacaaccagcattacagctgtagagagaagctaccctctctgctgagagctgaacacttgtatggacaccctggctacagaggggagttgctcactgtgggtctcctctgagctgttccattgctcagtaaagctcctcttcatcttgctcaccctccacgtgtctgtgtacctcattcttcctggacacagggcaagaactgaggacttcccaaatggcaaggctaaaagacctgtaacacaaacagggctgaaacatgccccttgctctccaagttgtgggtgaagagaagaagagaacagctgcagccctttggggaccccaaacctgggagctccctgagccagggctgtgactccctctttggggccctgcggttcctggcatctccaagcttctaggcaccaccacattctgcagtgtcagctggggaagcggcttgtggtacacctggtccagccacagcctcccagagagccggcacctgtgcctgctggcacctggagctgcccaccccacagcggcagctcgtgtgtctgactgtgcacagtggctggaccccacacttgcttacatacccctcactactccacacctgactcgcagtctccctgggaggtgtgggatccaggctggtagtgtaaactgagtgcagactgccaggctgagtgggcagaacaagcccagtgggcctgagcaaaactggggcaaaggcaccaccagccacagaagttttcagccagaaaagcaacaccccaaggatcctgtaacaaaaccagtcctgacattcactttacctctgaatttccctgcttatgtgaacaatacattcctttttttatttaaaccactctgagatagcttttgttgttgctgctgctgttgttttgaacacagacacctaaatgaagtgggctcctgctccatgaccaagctggcacttgagatggatcttgaagcatgtgctctagaatgctccaaagcattcttttctgcagccctctgatttaagccctcatccaatacatcttcgctgagcagtgactgtatgccctgttctcagcagaatgctgggatacacagatcaatgagatgttgtcctatggtccctactggagaagctcatgccttacaggggatccagatgggtatgcctgtcactgctacagggacgcatggaaggcttggtggcccagagaggagggggtgccccctctgcgggggagtcagtgaggatggcctgggccatattgactcccctccccaggctttcctccaagagctgtccctcccccactgccagctctcactcagtggaaccaggcctgggcaatcagagcattccttctgtctggcacagggactgactccaggattgccccgaccccaagccagacgaatgaaagtgtcatctgggccttggctggagtcttggggttggtgggatgataggatgttcgtagctgctggggtcatcttagggcttcctcccaaccagaggaactcaggtctttgtgtggtggctctgaaagaaacaaaaaaaattgctgctggaggttgtgatgtgcccgtctacatgagtcccagaactgctgaatctgggagcaagaagggacctccaactcttcgggtctggcccactcatgttactggcgagaaagcagaggtccagatgggctgggtggcatgcacaattcctcctggaaggagggcagagctgggaaagaatgccagtgcccgcctgccctgccccccacccaccatgcccagcacctgttcttgtcccttccagcatctcggcatgaagctgtcctcctctctgaggagaggtcggcctttctgggcctgctggaactgtggtgaaggctgcgcagagcccagtgtgccaggccctgaccctgctgatcactttccacagatggcagggtgggggcgggggaactcctgaagggggcgagcttagcccactgcttggctctgagcaggtggggttctgcagctgagctcaaggttgcagctgtgcagcctacttcaggttgggagggtcatgtgtatgcacatccatcaccaggaggtgagggaggaagggctccagaagcttcacctccctgccgtgctggccagggccttgccgtgctggcagggggatgaagtgtttcacatttctcatgtggtactgttccgagaaagatacaaatttagagcctgggtgacccccagtagatgcccagacagagctggagaaagaccaggcagagactagtgaatgaaaagtggcgggcagacgggtgagcagccggctttccctcctgagaatgaccttgtctgccacgcctttggctcccagcactgactgtgtgatccgcagggcccggtgcaaatgcaagatgcggccccctttgtcaaaatggccatggcaaagcattaaacccagaatggggccgggtcgaccgcagtcacacccatgaagcctgccctgtttgtgcagtgtacgcgtggggaagggctccggctgcttgttggactcttcaggagctggcatggagaagtgcttaggagcccaagtctctggagccagactgggtttgaatcccaagatcttgggatttaacctctgggatttaacctctcagagcacgagttcctttgtaagatggggatagcaacagggccattgtgggtatttggtgagtcagcatgtaaatctctcagcacagtgcctggcccatagtcaggttacacgagggtttgttattgttatgaaggtgaatatttgtctccaccttcccagttcacatctgggcctcctcacctgccccccgcaggctccagctgcctgctaggcacaggagagtggtcatgtttagaggccaagctgggtcctgggacccagccccacccagcgccctctcaccttctcttccgtcaagagcaggccagcgtgagccagggttggtggagcagaatccactcccctgctccgggagtggttgccaggaagcctggcctcgtgaacccgatggtctgacccctcaacaactctccctggagtgtggaggtgggaaggcccccagggtcatctgagggcctgggtaggggagcggaggggaaggctggggctgccctcttccctggggcagtggtgccgggaggggcagtgccagggagagctgtgagaggggagaggtggggagtggaggccaccaggtggactccaaaccctggactcctagccctgctctgcccactggctgatccctggccagtcctcagccatccctctgaggtgctcttgcccctctgccaaatgggatgaagactcctgaatgccacagagattctctgatgagcaaaaatatgagagagagagagagagagaaagtgtcagggggcggtggggagagagagagagagaaacaaaaacagagagacagggagggaggggcatgaacacagacaagcaggggccaacacagatgtgtgtctactcaggttatttatcccatcctcacaagcatgctggcttcaggaggggaagctctggacctggtgcctagaagtggaggtacttcctcctcctattcctgggtgtggtccccccaggccagcaagcattgcttttaggctggttagctcacatcgagatgagggagggagtctggcacctgctggggggctcccagctgaatacctctactgagcttgctctcaaagccccacttggtgctgacaagccgtctggagctcagctggccaggatgacctaatgttccactgggtcttcttctctgccatctttccagggatggccctcggctgaccctggcttctgggcccccagacccaggcaccttgaggaagaatagcaaacaagccggatttcaggaggcacagggccagtgtatgaccttggactgtttgcttttttaaacttaaaaatatacaattttaattttcatcgtgaagacaattgtgttcttggaacttccaggcagcccctgtcttggccagttcctcaattaggtgcctctcaagagggaaaaagccgaaatacaattacttgaggaacaatgggctggggctatatttaacacggggccagcctgggggaccacatgctcacccccctccctggctcctctccctcccgtcttagccctcaccttcctgtccctctgtctgggttccctggtctcccagccgcccccacctcactgtctccagctgtctgcaccctgaagctgttactgatggacaatcagacaagcctctcccaggacggctgcaaactccttcctccccagatccgctgagcagcctcacgcctctgaggtaggtcacttctgagtcggagatagaaaagtcagtgtcactgagcagaaccagcatctctgggggcggagttgtctgaaagaaaaccatcccagcctccatctgccacctttggatctcagaaacagtctatccccaatgccgccagctccctagctcacaagggacactccctgcctttgtcttggctgatcctccttgtaatcgtgtgaggcaggcccattttacagtggaaagcactgaggctctgagaagttacattagtaacagagttaccacaatgccaggagcttctgcctggacaagtcagcacctgggggttttggtgccaggtgtgcatcacacgcaggtggccgctgaggtctcagttgtcaggtctaatgagcgtgatgtccagatgctggggctggggacagcttcttcatttgtgggcgttttattagcatgtggtacccataggagtgaccgccatggagaagggatgtggcgcagctcattcagacaagggtcatgcaaggaggatgggagaggaggcctggagcaggcagctcggacgcctcctcagagaagcctcccaggaccacccggtgaggtcagaacatgctcctctgggtctcccacagcaccacggaagtttccttcattgcacttatcacgggtccaagtttatccttatgcccataggttttcattttgttttgcttttttactctgtgtcttcaaagatactgtgagccccttgaggacagggatatgtccttctgtgcacaccaggaaaatttcatagctcttcctcttagatgacaaggaccactctaaatccagatacacttcaagtgggtgttcattgatcaatcacgccaggctttgtggtcctttgggcagtcagggacatgtagcatgaggcacaaggttctagccacaggccaggctcgctacaagcctagtgccctttgcatatcccactggaactcctaatttctttgggatcttctgctcacagattgtgattctggtttgtttatttattattttattttattttttgagatggagtttcactcttgtcgctcaggctggagtgcaatggtgcgatcttggctcactgtaacctccgccttctggattcaagcaatcctcctgactcagcctcccgagtagctgggattacaggcaccgccaccatgccaggctattttttttttttttttgtattttcaatagagacgaggttttgccatgttggccatgctggtctcgaactcctgacctcaggtgatctgcccacctcagcctctcaaagtgctggaattacaggcataagccactgtgcccagctgtgatcctggtttaaatggcccttccttgaagtgttcctgtcaaggggttccttttgactgcatcagcatcttaagtattccttgagggtggcagattagggggagggtgttgaggtgagggtggatggcagacaaagtgatggggagattgtggtggggtgggaggttgatggcagcgatggggtggacagaggtgtggctgcatcagtgatgctctgctaaaggagggatcaattgggagttccaccaggtcagactaggatctatcggtgatcagctggtgagatctcctggccaacatgttcatctaaagaccaaagatgggttaaacgcctagcttatgtcctgttcccgtgtgctgtgtgccccatagtgggtaaaccagaccagcaggaattaaaacctgcagttaatgttcaacagctggtaaagggagagaaggatgctgaggcttgcagctcccgttacctccctgggagaagtcatcaaaggaggcaacggggtgagaaacgcactcaagagcatccagagaccccacgctgcccggctctggggctccaattccagcttgtagtgccaacacatctcagttcctcctcagggacagcaggaaggggctctgagaacaggccaccattggtgcaaacaagtgagaaccaggagaatcccccagcccttaaattcacatgggccaaaagataaattttaagagattcagctgaacttgccccaaccacaaacactagacaaataatctgaagcactcaacaagcatgaaactcggccagctctgccctcccgggttccttgtaactcgaggagccagcagcagccatccgttgtgacttaaagcatctgggtcaggagaaaccttgttcagttcagctggtgcagatcccccagggcccctcccccagtgctcaactccttgaagcttccccgacctggatctaacagtaatgtcttggatttataatgcttctggctccagggggctttatagacatcatctaattgagaggagaggaggggtggcgttgtggggagcaaggatcctctttttttttcttttttttttttgagacaaagtctcactctgttgcccaagctggagtgcagtgacgtgatctcgactcactgcaacctccacctcctgggttcaagtgattctcctgtctcagcctcccgagtagctgggactacaggcatgcaccaccatgcccatgcctagctaatttttgtaattttagtagccgggtgtggtggctcacacttgtaatcccaatactttgggaggctgaggcggacggatcacaagttcaggaattcaagacgaggctggccaacatagtgaaaccctgcctctttttaactgggaaggctgctaggcaggagacagagatgtcagaaagcctgtgccaagtggcctcctgagagccacacaaaaaagcctcagggtgaaagatctatattgtggcctcctgtgtaccagccctgcgtcgggaactcagaagcatgaggagttcacaggcacggggctcagactctgctctgcaggagcccttgacttgatacagttgatcaaggcccagccacaggccctagggtagacagggggtggttagaggcctggacctgaggtcctgctgctctctaccggcggtccaccttgcagattccagctaacccttctctactctgctttcctggcttgggctaaaagctggatctttggcctggcgctgaagccatttgatccagcggctgcaaagggtgtttccatcttttactgtcagctgttgcttctgagccaccagcatgtgtgggagacccttacatctgcagtcatggtgctccatggtgctggtgagggacatgaggtcccagaggagctgtggtttgctggacgtcagctggagggtgggagagtgggattcaaacccagcccatgctcttttgataacatcctgaaagaaagcagggcatctgacaaggatggacagagactggctctaagagaagtgtgcacgtctttggaggtgcgtgggctgaaggagtgtctgggacaggaagaggagcgtgtttggaaactgagcaaggacagaactgtccatgttgaaaggacagaagggaggtcagatggcaggggcagagagagtcgggggagggagaatgagctggggcctggagaagagacaggtcctgggggcggatagggtgggccctgtagataaagctggggccgtgtccagtctgccagggatgttccagttggcatggtgatcccgtatccttattacctgcttccactcctctttttgtgaagctgttctggacatgccagcctcatatgccacccccacctccatgcctagcgtaactacctgcacaggcaagctgactacaaatgagtgtcaaatgatggggtctccaaggatgctcagtggcatggagtttggaggcctggctgagcactcgagtgagaggatatttgattttaactacttgcacagtgaaagcccaacactcccagctggtctgtgtggcttcattttctatgtcaaagaaccaggataacaaaagtagctattatttattaaccattttctatgcactgagcactggactggaaactttacaaactacttaatcctcacaagcactgtacaaggtaggctcagagagggtaggtaagtttcttgaggtcacacagctagaacattctgactataattttaaggtgatttccccaaaaaagagaaccctttcaaaagaccctgccccagagtagctgcttgaaacatatttgttgactccaaaattgaacttaattgagtcttcaaggatgggtgggattgcatttgttgagacagcaacgagcaacaatgagctctccaggctgggggccagcatgagagaagacagaggggaggccatgcgtgggcgtaggggaggcaggaaggagagctgctcaccagtgggaagcctctgctttggggagggacaggaaggaaagctggtggcttggggggtgggtggtgctgctgctgctgagtttggaatgcaggacaatagggaaccattgtaggttctggagtgagggcagatgaaactggtgttggatgatggctctaaaggatatgggaatgggtagagaaagaagaggctagaaaaagagaagccaaaatgaggctaagtcagagaagaaaagataaactagagtgagaaagaaagaaggagagagccatgaggccccgggagagggggacacaccggtaagtggttaattgctaccatttgtgcactgtaattcaccaagcccccgcatatatgttatctcatttgatttagtgctcaaacccggcctatgaagtcatagttcgctcccacatacggagccctgctggatgccaggtactttatgtacatttcctgtagccctgtcaacagccacaaagggtaaacatgacccttttacagaccatgtacctgcagattgggcagattaaggaactcacccaagataaaagaccagacctgtctggctgtgtacctaggtctgatccactgttccggacttgatcccatttacagaggaggaagctgagagaaatcttggatgctgcagaagacccgttagcatcttggtggcgtctgttccttttggctccatgcccatggcttgtcttgctgaaacccgcttccacactgtagccttggggcttggatgccatgtggccctttcaccccacccaagcccctgggccatttctgctggtcccgtgattcctcaaatgaatgcatccccttaaggctcttggaggaagcttttccagattcctcaagtcagctcttgaggtccataatagaaccttggtgagtggaggcaggttcttgagaggagacagactccagaccaactcttgccttgccaaatgaggattagggcttggcactgtaagggttggagggctctttatcaggcttcgggcctggatgggaagcaaactccagggacataaagatattcgagggaccagggaccgggcccgtgccagaccagccaagagctggaccagggagcaggcacggggagggctgtccacagaccaggtgcaggcagcagccctagggcttaaggggccatgcctaggacccagcggtgggggcgctgccaccaggatgggcactccctctatctggctccacacagccatagttccagaaccactcactgaccctctcagctgcctctcttggctggagggtggggattctgaagctttatggggcctgcagaagggggaggcctgcctgtgggctcctgctgacacaggtgtcttctcagtaggggaatggaaagctctgggggaagtgggtgctaggggtggctaggccaccacaccactgccaagtagactagcctgccccgccagctggagaggcttcctaaatatctattgaccgagtagcagaaagggaagccagtctgaattagagtctactttggagagagaatgcatgaaaagcatattcaaacgagacactagaagtccctccaggacctgccctaaggaatagagaatggctgtcattagcatcttacgaataaatgtcgtgggaaggtaacctgagccttccttagtgggtcagagtgcttaaagtctgctctccaaagtgtctctgtgtcctcctggagcctgcttgtgaatctcagcagacaggtttggttgtcagaggctagcttcagcctggctctgctggaagagctccagctgccctccaccctctgccctcgaccctgccccctgcaggatgaaggttaatataaggaattgctgggtcctgctgtgtgtccacatgtcatcctgagctgccagtttgcctgaaaatagacaaatgtcctatgtgccaggaccctggtcctccggtctcgggctctcctgggggtccaggtgagctgggacaatgaggtcggtcttgacccttccgaccattacacctctctgcgcaggtagggtgcaagctgggggtgagacagagttagcttcaggcccctggctatagggatggcgcccaacctacgctgatggacagaattctatgtgttgaaggaaggctgggctggagtctaacctcccacctctgcccctaggcttcttcttatcccactctccagcgcagtgacctgacctaagagaatgcctctcagatatgtggccagcagggactgcatgtcctgatggccctgtgttcataatgggaagccaggcagatgcagaaccctggctatgggttctaatccaaccctggattccatgaagggacaaggatggtggcaggatctgccagcatgcttggtgggatctgccgtcccctgaaccagtgcctcaagcaggtgggaagtagcttgctttccttttctgccaagggtaagcccttccttgacaagggtaacccacagggccccatggggtacacgggagaggaatgcaggcaggctgggctctgtctctcagatcccactgggctttctaaagagaagtggcttaggccattaggagggatacaaggctggtgctttggccaagctggtggttcaggggcatcaagagtgggacttccaaaccaatagcctgtgggacaaaatggtttttaataggcccatgcagcgtggggctttttgtttgttttgttttgtttttgctgtgtgcttttgttttgaattttgagttcgctgttggcacttaaatttgagaatcttttacatacaaatctggatttccagtttctctggaaaaatcaggagacctaggctggaactgagtggcaggtgaccctctggaactcctcgcccatcagcatcccttcctccagctcactgccctcactttggtcacttgcctggcactggagccagtgaggctgtgaccctggaactgatgctttgggtggggacagtcctcatggatgctctgtggggtctgtcttctggggaaggctggcctgggtaagtgatggttgggggtgggtgtgtgcctgatgactagggtggcaaaggcaagtgccttcacagctaggccaggggaattcacctctgtagggacttatgagatccctacccccacccacctcattcaggagggtaaggactgcgggggtcaaaggctttttttgggaaggggacagctttccccaaagtgctgagctcctaaactccggcctgattagaggctggaggaggaggagggggagtcttcctccagtgtcagggctcagaccaggagctgtgatcactaaggccccagggtggcgaggaagccctgtcaggagcacatccaaggccaagtcagctgctgccttccccatctctccatcccgccgccaacaacttcacagagtctcctttggcagagcctgaacccaggttttctgtagctgcaggtggctgggcgggggtgaggactgagcctcagggcagtttgcggagtgccccaggatgctgtagtttgattggggagcgggagacgatcctctgttagggctgaaagggactctctcttctgacccagaggaaccacagtcctgtgtcctaagcacctgttcttgctggaaagccttggaaagcaacgctctggaagagaggaagagggcctctgctgcatagagtgtgggtgtgggtgtggaatacagttacccacagccatcgagggagcagcttcgtggccttaatcattaggagggatgaccctgagtggctccagttctgggcaatgatggagtggaagacaggccaccctctggggacctccccagaggatttcagctgccctcctgcctgtgacccctggcaagtagtttaacctttgtccaacgaggaacatcagaatagttttctcactaggttgttgtgaggctcaaaggagattataaataatggcagccaatatttgttttattgattactggccatgaaccaggcaggaagtcccagtcatatcaaacatctgctccttaagaaaaatggtgtgttagtgcctgtgtgttgaacactgctgagccaggtgcgaccctggggcctccagaggacccgcaccaggagtgcagctgaggctgggggatccagcggatgtggggaccggagaccctgcagacctgctccatgcccacgcacggcccacaaacagcctgaaggaggcaggagagaagcacagcacggggttcgggcaccagctggtaggagcaccagggttcgaacaccagccacgccccacacagacctcgggcatgttgctcactctttccaggccttggtttcctcatctataaaatgggcatgatagtggcatttatggcacagcactgtggtgctgctcaatgagatgccatctgacgtataacattttgaaagatcaactggtattttcccctctggatttccttccccacccttctcggggtctgcagccaggctcctcagcggtggtgttcctcccttctgggaaaggacgtggcagaagagggcaaaggcaaatggaaggagcctcttcctgaattttgtgtgcaaaagccttggctttaggggaagctgtagggcggcaaattgagaaaaaacatcctgaatgagtaagagcagccctcctgcccaaccagctaaaaaagcgctccccaagggggaggagggtagcggggatatgggggagaaccggctcacggctggagcctggggaagggctgcagtcccacctgagggctacgtgtgggagcagagggcactcatgcctcctgtcctggtgagatccctgaggaggcagccaggcccagagaagggaaagggctgggcagtgtgatgaggtcacggaccttagagagcctcattatgggctttcctcccccaccagactgtgaaagcagcagatgggtcctgatgcaaccatggcccagaagaaatggaaagaaccccccacgccccccagactagagggttcctgagacaggatcacagggcagctcaatggctaccaagtggactcacgacattgaggtctcactcaataccttgtcactctgacaaccccatgactacccacaggaactcagacatcctcctggggaaaatggccagaagttgagttgtctgagatgaagattcgcccactactggcaggggattcaaaatgaaaataaggctgagtaacagaaaatgaagacagtcctatgtcttgcacagttgaatttatgaactgagatttgtgttgcttacaaattcacacaaaggagttagcacaatgccgggcaccaccaggctctggctgctgtgtccatgtggttgggatgctgtggtgggcccagagctggatgagatgccgagctgggactctatcaggtggctggtcaccttccctgctgagggcatcaggtgagtggctgtccttctgaaagggtgtctgagtggccactcagcttctggtgcttcccaagctgcctgagatctgaatgtgaccatcctctccttctcccacccgccttcacaagcatctctctccatctccctagaccctgagacctggagctttcagcctgacatttggcacaacctcagatgcagtgatcatggagcattctctgggaagatgggcctcagttgtttcctgccctagcctggaaaacacagagatctctgaagacagcgcagactgagctcatcagagccatggggaggagccagcccaggcgagtaccatttctgcttctggaaggggccttagctcaccctgctctcactctggagtcctaggaggcaatggccacagccagcaggcatccatcttatctgggaaggggtagcccaatcagggtcaacagagaatctcccagaacagaactctggccaaagcctctaaaaaagctgctggggattgaatatggagttttctgtacccacctggaccccacctgagggtcctcacctgagaatccaggctttattctccttcatggagctgatctgcctgaaatgtcgtcatattagtcagggctttccagagacacagagccaataggatgtgtgcgtatatagaaggaggtttcttttagggaagaggctcctgtgactatggaggctggcaagtccaacatctatatggggagtgatcaggaaagagttgctgctgctactgctgcagttcacgtcctaaggctgccagggtagagtcggcgttgcagcttcagtttgaaagccgactgctacagaaatctctcttgctcagagagatcagtctttacctgatggaatgaggccgacccccattagggagggcaatttgctttactcaaagtctatcaatttaaatgttcaaatacacccattcaaatacaccctcagagaaacatccagaagaatgtttgaccatatatctgggcactgtggcccagccaagttgacacataaaatcaaccatcacagtcattcattcattcatccagtttggttggtgggtatggaaacccacccaagccatctcaaataaggggaatttattgtaaaaacatgcagagatttcacgagaacccaaagatgggcatcaaagtgtcaccagacatcatggaaccatgaagagcacagacctttatttaatgggtatgggaagcagtgatgggagggaaaagcatggggtggaatgggagatctttgattttgtcccaccatctcacccaagtgtggaggagtgagtctgccctttggacatctcttcagcacactctggagccttagagcagcagcagtgtgggggaagaccataagagcagctgatttgatacccatgacttgtgaggggatggggagaggagagggcccttgctgcggggttgagcatcagagacagagcagaaaggacccagcaggaactagtctgagtcatctcagaggaagggtgggggaaagggatgggagcgtgagaagtgcatactgttccccacttcccccaccaggctgtctccagagcttctaacagacattcacgtgtcctttcacgtgatcttgacaactgctctaccattttactagggaggaaactgaggctggggatgggggtggggacaagaggagaacttgcccaaagtcgaacagaaaggtcaaaacaggaatcattgcccaagcgtttgatttccaatttcagagctttcctgagccacactcagggctctctctgcacagtggtgaccagtggagagtcaggccaatttggttggaattatatacactggggttcacaaccagcactggagacacttgccagctgcatattccgagtctcccccagcctgcctggtttgctccatctagacgctctctcaccaagactcatgccacactctcctaactgccttccctgcctttactcctggcctcacaatccactgtcggcagagcagccagcgtgggctttctgccttcacttgatcttcttccactggtttccaaagctttttagcatggagttcacacacatcagcctggcccaagtgacccagtcctggcctctgttcccatctctaacactccccctcactcaccatgtcactcagcatgtttgagactgcaagtgacagagaggcggactcaaccagctttatcaccaaggagaccgtgtgatctcctggagcaagacatctggaggcagggcagtgccagggttgcttagctcagactccacagcatcaaagatcccggtgttgccactctttcctctgtcatcctcagcccatagagatggcctcttaggctgccacaatcccaaggccacctgcagatgacaacatccagaggcagaagaaagcatttcctccatggtctctttctatcagtaatgaaacctcttccagaagcctccctcagagtactgctctggctcattggtctgaattgcagcacgtgcccgagccaggagggaagctctgtgattagcctagaccgctcaagttcatccatgggactgcacaggggctatgtgcccaccatggaagaacatggctacccaataactcaatgaaacagaggctgtgctagcaagaagtgtttgtgttggagcaaggaaggggacgggtattggatgggcaaataatggcacctgtcactctcactgtgatcctgcctcatcaaccttctccctcccgcctggaacattcttccccagcttgatcccttgctggctccctctcttttaggtatcaaagaggccctccagaatcctcaatctgtgatagtcccccactcagttattctctcacaaagcatctggctcttctccttcagagcactcatcccaaggtaaagttacatttttatttgtcccttgcaccagataggagctccctgaggtgggatcaggtctacttttgctcctccagaatcccaggttccacgatggcatatggtgcaaagtagtgcctacatctatattttgagtgaatggtggcatgaaggaatgtcagatgctatttaggcttttcagatagtttcttttaaaattttcttgataactctttgacctagttatttttatcctcattttacagatgggaccactgaggcagagtgtcttagttcatttgagctgctataagagaatgccctcagaaataacgccacacatctacaaccatctgatcgttgacaaacttgacaaaaacaagcaatggggaaaggattccctatttaataaatggtgttgggaaaactggctagccatatgcagaaaactgaaactggaccccttccttacaccttatacaaaaattaactcaagatggattaaagacttaaatgtaagacttaaaaccataaaaccctaaaagaaaacctaggcaataccattcaggacataggcatgggcaaggacttcatgactaaaacaccaaaagcaatggcaacagaagccaaaatggacaaatgggatctaattaaactaaagagcttctgcaaagcaaaagaaactatcatcagagtgaacaggcaacctacagaatgggagaaaattttttcaatctatccatctgacaaagggctaatatccagaatctataaagaacttaagtgggcaaaggctatgaagagacacttctcaaaagaagacatttatgtagccaacaaacatatgaaaaaaagctcatcatcactagtcattagagaaatgcaaatcgttgagacaccatctcacgccagtcagaatggtgatcattaaagagtcaggaaacaacagatgctggagaggatatggagaaacataaatgcttttacactattggtgggagtgtaaattagttcaaccattgtagaatacagtgtggcaattcctcaaggatctagaaccagaaataccatttgacccagccattccattactgggtatatacccaaatgattataaatcattctactataaagacacatgcacacatatgtttattgcggcactgttcacaatagcaaagacttggaaccaacccaaatgcccatcaatgattgactggataaagaaaatgtggcacatatacaccatggaatactatgcagccataaaaaaggatgagttcatgtcctttgcagggacgtggatgaagctggaaaccatcattctcagcaaactaactcaggaacagaaaaccaaacaccacatgctctcactcataagagggagttgagcaatgagaactcatggacacagggaggggaacatcacacactgtggcctgtcatggggtgaggggctaggggagggatagcattaggagaaatacccaatgtagatgacagatttaagggtgcagcaagccaccatggcatgtgtatacctatgtaacaaacctgcacgttctgcacacgtatcccagaacttaaagtattataataataaaaaaagagaatgccatagaccaggtggatgatacacaacagaaatttacttctcacagtgctggaggctgggaattccaagataaggcactggtagtttcggtgtctggtgaggacctgcttcctcacagatggccgtcttctcactgtgccttcacaaggtagaaggggcagggcaactctctggggtcccttttatgagggcactaatccattcttgaggggtccaccctcatgacctaatcaccaaaagccccatctccaaataccatcacattaggtgccaggatttcaacatgtgaattgtcagggatacatagcactgagagacaccaaatgacttatctaaggtggcctggatggtaaggagcagaactaaaattcacattacttcttctgatttcaatttctatgccctttttcatatccacttaggtgtttttggttaaatgacagacaacttgacccagagtgtattaagctgatttactgcaaaccaacacatttaaaattggtttcactcagcatgatatacagagaaatggatgaaggatagattcttgagacttagccctgctagtaggatggccctcttgtacttccatgtgcttcaaaccatgatgacgatgacacaccttggtattacacctgcccaaccaacatgcctgcagatgttggtttagcattgtccgcattgttctagagtgaaatgggtgtaaggctgtcaccattctcacaaattgttaataagaagcctttatcaaagggatatcttcggactgtctgtttctaacaccttctgaaccatgacttggagccagcagaggaggctgtggctacaaacttcagcacaaccacgaacactgctgttcaagaaattacaatttatgtccatcccaagttgtaaatgctagtctttttttccatggacctcagacaattttatccatgaagctccttcctcataaaatctgtggaagcccaatgtatgcctggagaaagagggtgccctggatctggaggctggaggagcggagggtaggtgtgctgagcaactccctctggcctcccctttctctgaccccagggctcttctagggtgattctaggcttcctcagagcacagttggaaacgcttgctctcctccaaccccttcgctatagggactgaaacagagcaccaagaaggttaatgccttcctttgtcacatggctagtatgtggcagagaagtctttgactcttgctccagtgctcctttgagaggaaccagcagacaagtctttaggcaaagggctgtcaagacacatttaagaagcaatgttggcccggcacaatggctcacacctgtaatcccagaactttgggaggccgaggcaggcaggtcacttgagcccaggagttcaagaccagcctgggcaacatggcaaaatcctgtccctacaaagtatacaaaaattagctgggcatggtggtgcacacctgtaataccagctactagggaggcttacatgggaggattgcttgagcccaggaggcaaaatttgcagtgagctgagatcgcgccactgcacgttagcctgggtggcagagtgagaccctgtctcaaacaaacaaacaaaacaaaaacaaagaagcagcaatgttaacccctcttctattactttcctgctttccactcatgagctctttgtagcttattttcataggacccaaagatgtttggctgagcctgacataacagaatgactagcagatgatcacatttgttatatgggttcagggaaattgaaaaagacacccagttctcattaaatgtgatcaggcatatgaagagcttagcacagcagatgaaatcagcggacgtcagccagtgttgttattgtcattgtcctgctctaagcttgcttctgacatctgttcacattgtgactctgaaacattctcatcccagtttccttgcctgtaaaaggatgacaatgacaccatcctcttggggttatttcgaggaccaaaataatggatatacaacccttttgaaaaatacaagagtaagctagcattattattacttggcaaataattgaattttcttccaattacacatcaagtcaagcacaattcacctatcaggtttatgactgtgatcatttttgatgggaacttgcatgtgaattttacagctcacacttcaacccaaaggagaacactttattgacttgcaagctaacacctgtgatcaaggcagaaaactgaatttcaaaaaaaccaaagcttaaatttggaaattggggcataaataggagaatgtaccaagctgtgatttctttaaaagctcaccagacacaaaactgaaatacaggattctacttttgttttgttttgtcttgtttttgagacagagtcttactctgtcgcccaggctggagtgcagtggcatgatcttggctcactgcaacttctgcctaccaggttcaagtgattctcgtgcctcaacctcctgagtagctaggactacaggtgcatgtgagcacacccagctaatttttgaatttttagtggagatggggtttcaccatgttggctaggctggtccggaactcctggcctcaagtgatctgcctgccttggcctcccaaaggattctagtttttaacatcaattttgtctttgtgttaaagatgggttggtggcaaatcaatgaaaaaatcaatattgtcttctgataccacactgtcctcctcatactttattttattttcaattttaagttgcagttgaagtcacttgtttacttgagaatcagcctcttcgactaaaagttaaaaggcttgagttctagtttaattacaccaccaactaagtgtcctaccttttgtaaatgacatgtctccctgggcatcatatacttctgtcctacacaatggtggtgtgtggtgtagtggttgtggtagtggtcatgatggtggttggtttgctgtagtgatgatggtgttggtgttggcttgtgttgtgatggaggtgttgttgctggtggtgtaggatataatggaggtggtggtggtaagcatggttctgatggctgtgatggtggtggacatggtgatgatggttgtggaatgaaatggttgtggtgatggtggtcgtgatggtgatggtagtggtggtagaggggatggaaatggacagagagacagtggtcaaggagggttggcctagatggtctctaggttcctctcaggtccaccattctacgttctttgatttctgctgccatttgtgtggccagtggttgtccactggggcaatcagtgaaacagaggggaaaggaaaagattcaaaattggcattgttgagagttttcactcacttgaattctctttgtaaggtctgtgtttggggcactaggagtcctgttctgtagtatttgtggagtaggaaagaagatttgatcagggaggttaggtttggccaagagtccattagactttgatgtcttctaccagctcccagaattgagatgaaaaggacagcaccgtattagatttttgctataagaacatttgaaattggggaatatgtaaatcagagtcccaaaaagaaacagatggtgcactaaattaggataattcaaggaggtttaatttacaaaggaatatttatagaatgtggccagggtagaggggaatcataatggctggtacagaagcctgggctaaaaacaggggttaccatcctaggcttgcttacaagagggagagtgtattagggttctctagagaaacagagccaataggatgtatatacaggaagagatttattatgaggaatttacttactcaaggctgagaagttggagctgctgtctgtcagctggagacccaggaaagccagtggcataattcagtcctgagtccaaagacctgagaaccagggatgctgatggtactaatcccagtccaagggcaggaactgatgtcccagctccagcaggcaagtaggaagaaaagaaagggggccaattaattcctccttcctccaccttttgttctattcaagctatctgcagattggacggtgcccacccacactgggaaggacaacctactgagtccacatattcaaatgctaatctcatctggaaaccctctcatggacacatccagaaacaatgcttagtctgggcacttcctgggctactcaggttgatacataaaattgaccatcacagatccattacaagcactcaagagagacgatatttgtgtagtagaggctgcctcaggagaagatttctgtggagggtcccggccagcagaggcaatgctgcagggagggagccaactagctgggtctcactctcttcccttcttttggtctcctgcctgggctcacaattggccaaacccaagcacagccagggcaggggagcctactgaggtggttcacacccatttgtctcctgggcagagagcaaggtggagtgggaaggacagaggacctggaaggggaacagaaggtgcaggatcccattaccattaattcatccacacagcacatggttctgaacatcgatgtcctactaactaatgttcttgcatcacagcccgcatgcagtgtacgtgtgacacatttctgttgaatgtgttgggatggcctttgagtttggagtaaatacccagcctggtctccctctgtccccagtgaacattctcaccaccaatggggccaggacaaaaggctgcccccgccccatgcccccttttcctgaccagcccatggtgcatcccaccctctgcatagccaaaccttgctcaaggctgacttattgaggtgactgtgctgtagcttcctgtgtgtgggagccaggaccattggagctctgtgtctcatgccttgaaggctgcctggcacttaataagtgccagtaacaggagacactccgtaggtatttgaggaacggatagcaaatgcttttattgtctcacaaaaacatcatgctttcttgtcttcctgcttttggtcatatccccctttatccttctcctatcttcttgctgtgtcttttgtccaagtaccacattcccaggaagacttcagggacaccagcccacagcagccagcccttccgtcgtgacaacagcgggttccagtccagtgccagatcctttcctaattgtcccccatgtatgccgctcacctcctcggccagtcatgagctgggcttgaaatccagggccatgaatttaggggcctcatcttttatttcatttgttctcaacaccctactgcctgccctcagggtacatgatgcgagaacaatgataataataatagtgatcataataatgagccatctgagcccacgcagaaccctttccattccatgacttattcctttctttctgtttgtttgtttttgagatggagtcttgttctgtctcccaggctggagtacagtggcaccatctcagttcactgcaacctctgccatcttcctgccttagcctcctgagtacctgggattacaggtatgcctcatcatgccggtctacgttttgtattttttgtagagatggggtttcaccatgttggtcaggctggtctcaaactcctgggctcaagcgatccacccacttcgacctcccagagtgctgggatgacaggtgtgagccactgcacccggcctacatgaattatttattttaattctcacaacgaccccatgaggagggccatatgttggcatccccactttagggatgtgtaaattgaggttcaaagaggttttcagttccatctcacagctggtaggcagagaagcctggttcaattccaaaacccgctcttgttaccatgacatcaactatttccacacctctactctttagtgttctcccactcttcatccctcccctcccccactcagcatctagaacaggcctgggcacatagtaggtgcttaaataatgcctgtagattcattgctaggtgaggtatcccatgattgatcaatgaccctggcctttctattaacaccgggaggtacaggaaaacttttgcagtcaggcctcatctccagaagtcaagcaaattaccctccaatagcctgacagcccctttgtctccccagagtggggctcgggctgccgttctagccatcccaggacattgctcccgacaatcgccttttgcttccagagcaggaacagcctgcagaaaatcctccttttagccctccgaatcagagcgacaggggcccataaagtccaggttatgaagtgtcaccgtgtctgaaacaactgcttctttattgcgtacgcacacaccaggaatccgttcatttctgggcagcggctgatggaaaaagagaaagattttccatgtatttattatgtgaaacataacatacgggggacatgaatggtgatatgtaattagacataaaacgaaccagacttgaggaattgccaaaaatctgtggcaggataatgaaagtgctttgggtggtatcatttatttcacaatctgtcattgcaatcgacggcctcagtaacctgttgaatgccgcagaaacacggagctggaagttcgtttcgggggagatgcctcccaggcaccatctttgattagttcctgtgtcttttctaaggcaaagatatattcaccttggagccctggtggcaaagaagctggataaagagtgggtgtggaagagacgaagcccatcccaggcagagggtaggtggaagcctgtctgttgattcccccagctgaactgggctgcactgctgtctttcatatcacaccagctaggaggggtgagagcaggggcactgtggcagcttctagttccagctctatggcagtctccctttgcaaccttcccagaccactggaattccctgggcctcacttcccaactctgcagaacaggaagattgacccaagaacatccacatgcaaggatgcatgccaggtgagtgggggccacagtgagaagaccctgatgtcttggcccctttcataataatcctatccagcttgtcattcatctctgagggtgtatgtgaagcctttcaaattaaaaacatgggccaggcgtggtggctcatgcctgtaatcccagcactttgggaggctgaggcaggcggatcacttgaggtcaggagtttgagaccagcctggccaacatggcaaaaccccatctctactaaaagtacaaaaaaaaaaatagccgggagtggtggtgggcacctgtaaatcccagctactcgggaggttgaggctggagaatcacttgaacccaggaggcagaggttgcagtgagccaagattgtgccattgcactgcagcctgggtgacaagagtgaaaactctgtctcagcaaaacaaaaacaaaacaaaacaaaacaaacaaacaaacaaaaacatgccagagctgatccttgtggtagttgacttttaaattaactttgaaggtctactacacatacacctggcacttagcagatacccaagttcttccttcgtgctcaccaactcttgtccatcttgcttccttaagctccacatttgtctccaacaccacctttgcttctgcaactgccctggctcagtctctcactgtctctttcccaaatactgtaaccacttctagtgtggtctggggtggtgagtcttctctgtttgcctctctccctctcattctctcttcattcttctctgccctgttctgtgtccccagactgaacccctgcagactccttcacagccagcagccagttctggctattgcccatggaaagccccaaaagaagacctaggggctgttttttgcaccattcctgccccggatcatgtttccagtcgtggctgcatcctcaaaggtctgcagctcctgccgatggtgcctccagctctcacctggcgcagtgatgcaatttcctgccttcacccactgctttggggctctgggggccttttcatccctcaccggtcccacccaccctccatgagcaatagctttatcatccatggattgagccccctaagtcagactatttcctgccagaatccccagtgtacatgctgtcccctgcttctgctgacgccatgcacaattctcaaagcacagtcctgactgcgtctctcccatgcccagacaccattgcctctccattgctgcagtcagtgtgaaaggggcagcgtgtgcagagggccgctcataaccctctgcacttggctcagatgtcctcttctctagtctccttcctctgttgcttgtcatttcccagcagaacaagctgctctccctaaatacaatccccactgctccctctccccaaatctccatagctccaaatcccacctgtccattgaggctcagctaaaatgtcacctattccataaaacttcccatcttcttccagctggaagcaattttctcctcatctatactcccaggggatattatctgtttctctcttggtcacttatcacttccccaacctgtattaggataatttatatacaagctgtagcttcccttctgggctgtaaattccagtggtgcctctttcatctcgctgagggccgtgtggaatggtcgttacacaggtgtgctctggagacagccctcccagcttcaaagcctggctctgctgctttttagccacattaacttggcacattacgttatcctgtggagcctcttgttgctcatctgcaaagtgggggtgtgcgttttgggggaaataataccacctgtcctataggattgttggaggattacatgagttagtacatagaaaacagtctgaagggggttggcacatcatgagcaccctcatatcttctgttcctcttattctcagtagcatgtggctaattcattccatgtgctgtcaagataacgggagagtagatcagatgatagggcaatgcctggaaaacaaaaacctcctcatcacaacgattttcctagattggtcgtgttagagaatgtgaccatttccaaagctggaatcccattcagagacaaagaccaacttctcattaaaacatcagacaaactgatgcctatagctaatgagtggccagagctggggcttgaagttctctcacagcaagtgttcttcttctatgctctgccaagcttttgaataattagtttccaaacttctaagccttaagagaagttgacctcaaggagaccagcctggaagatgggacccccagtggaaaaggggcaaggacccacggccctggggattccccaggacttgccccacctcctcacaacttgggagagaaatccaagggtctgcaaacgctgccttgtgtttgcctcctggaacttcacatcctgctttgggagcagtttaccctctgagtagctctcaaaataatgcaagattccttcgctttgagtgagaggcatgggcatctttggcgaggaggttgacatagagtcactgggaagagatggaagagaaagagcccccatttgtgatagccagtcagaaagcagaaaatagatttggtctgatgacatttgggcaactattgaccttgtcatggagcccaaaggcactggccaggtggggaggggttaggtggcagaatttcagggagaatgcttccaaacctctgccaccaggagtgtatgtcatccctaccctgcagttggccggctccctctggggcccatctagctaccaacgcagatgcctcacaaaccaggggtggcgggagagtgtcagtagagggtgggggcgaccccacaggtcacccactgagctggagtcgcaaaaccaggcagtatgggtgcggaactgggctcagctagctccatgatgcagatatgggacaggtgttctcttttgggcagcatggaagttggagcatggaaggccagacacccctgcctggcctctgtgagatctctggaaagtctcctaaagccaccaagtgtcagtttttctcatctttaagacgggacatgaaagtttctcagctattgggagcaggtgaaaaggcctggagatgggggagtggagttgggggcgggggttctggctcacctgagcacctgagtgaggtgaattcagatcctggtgctaccacataatgcggtgtgtccttgagaaatggataaactctgagtctcattgtcttcacctttacaaaggggtcattgtgagggtcaaatggtgatgcatgtgaagagctcagcacggagcctgttcatgtgattattagcaaggcacaaggccaggcacacgaaggctcagtaaaccttaatagaatggaccatatacgggagggacttcggccattacaaagggccacatagaagcaagggctgttgttatcatacccaggcaatgggggcacttttgggtaagctgtggtggtttctgcccctgggagaccttctcccagccttctttgcatctcatgttggtgtccagcctggacttgggaacccatgcaactgacctttatccaagagtgggaaggaccctgctggaaaatgacttactagagaggagttaaactgtgatccaaacttaggtctccgttcagaatattcagcggtcaggacaccggggccccttggtacccttccagccagctctagctgcaggttggaacagtggacaggtttggcaggagtgcaggtgaagggggcaagaggaggatcattttggctgtggtgtgctggttgtctcttggtgtgctccccaagccctggggggcaggcagagctggctgtgggggaggcactgatagaggtttctcccatccctgcccctgcatcaaactttcaactttcaaacaccagggagccactgtcactcctgtccacatggagacaggagagagtcacgggggaggagctaagagactataacaaggcaaatatattaaggaaggggatgtaagaacttcccccaccaagactaccacgcccttggctcatagacataagctcataaacacacatgcatgtatttgttgatacagtacgtgtaactatacagactttgaataaacatttattatactcctatagggccctgacactacaaaaatgagtccagttctgtcctcagggagtttgcagtttggggtgaggtgggggaaactgactcaaacaatgaggtgttggtgctatctcttctatgtgcaaagcccagggggtttgagagagagacatttaatctgcttatgagaatctgggagtgcttcaagaaagaggtgctgatagaactgggtgttgaagggtgagtaagagtcctccaggtgggctagacagaaatctagttagatgttgcctccaacaggaagtctttcctgatcctttccccttccccacccacctggcctaggtgtccagggcttctgattccttgacactttgcatgtctctgccactgtgagccactgagggcagagactgagtgtttgtgcccctagcttctgaatcatgtctaacatatagaagactttcaataaatgctgaataagtatgaaagagaaaaggaagacatgctgggcagagagtggagtgagcaaaggcaaggaagagggaagatgaaggggagtggaggcatttgccgaggcaggacacaaatagaacaatgcagggacataagtcagatgctgctgaaaatggcagcccacagcaccgcttaccaactctcccatgaaagaccttaccttacagagaggaataaacagctattgctcttacctcaaacatcctcccaaatgcctgccttttctccctccctggggaagacaagcaagaccagtgctgccacaggagttgctcaaggttgctcaaaggagttgctcaaagaaaccaggaataggacctggtttctctgctgtcattgtccttagcttacagcctacagcctggcaaataccagtgccatggactgatgaatgctttgcaaatctggttcccattaagttgccagtaaaaaaacccaagaggttcatgtggcaaagtcagactagatgtgagcagattgacaaaagtcccaaagaactgaactagccccatggctctgatacccctcgtgggtttgaaaatatccagcgatggccaggtgcagtggctcacacctgtaatcccagcactttgggaggctgaggcaggtggataacgaagtcaggagtttgagaccagtctggccaagatggtgaaaccccgtctctcctaaacatatacaaattagccagttgcagtggcgggtgcctgtaatcccagctactcgggaggctgaggctggagaatctcttgaacctgggaggcggagcttgcagtgagctgagattgcaccactgtactccagcccgggcgacagagcgaaaaaaaaaaaaaagaaaagaaaatatccagggctccgggggatagcccttgctttccagtgttcctaaaagaagataaagtcacactatcaaataacaaatgcctcatcaaaacacaacccagagatcagcccagttcttccaacaagaaacaggccagtcatgacagtattataattatgatgacgaggaagggaatgctagccaaccactcccctccccgccccggcctctatcaggggtaagcccaggaggcaggagtgcagagtggctgagggcaaggcctctgccctgttggaatagcctgggcctgccccttcctagcctgtgagctgtgacggggattcagtgagggtctcaggctgtgtacagcccaggacagtgcctggctcagagtgagtgctcaacaagctttaagtgtcgttagtattcttgctgaaaacatgaaaactaaccccagagctaagcagtggaattctgcccgtgttgggggtgaagagaccaaagttcagaaaaattcattaacatgtccaggatcatacagctggaacaggggaacaggcagggctgagctccaagtccaggcaggctgagcccagagccctcgctttgaagctgttttatatgactccttagcaggaagctactcagggcggactgactcaagagcattgtttcctggaactcctgagtccaagagctgggggaatgctggaaacaaggagaaggaaggcagagaatgcttgtggaggcagcaaggaataaatagatgcaagaatattggaaggtgtcataagagggataaggaaccaatcgcacctctgtctcgccccatcccctctccaggtgagaagtgctggctctgtgtgagactttatgtcagacaggggctcagtgctgaccgttcagccctgtgcctagggacagcccttcagcctccttgacgatttcctgatttagtctgggtctgagggcacctcctcatctggccaattcagggtaaaagaatttggaaagctcaaacactcaagaaatttagttttttgttttgttttgtttggttttgagaaagggtcttgctgtgtcacccaggctggagtgcagtggcacaatcaccatcactgctcattgtggcctcaaactcctgagcccaaatgatcctcccaccttagcttcctgagtagctgggaccacaggcgtgcaccaccacacaagctaatttttttttttttgtagagacagggtctcactatgttgctcaggctggtctcaaactcctgtgctcacacaattttcctgtctcggcctcacaaagtggtgggatgacgggcatgagtcactgcgtctggccaagaagcttagtttttaaaataacaatcagtaaaataggttacaacttttcagtcaaacctgtcaggtgagatgaaaattcaggaaagccaggccacattattttcagttaagttctgtgaaaacttctgcaaaatcaatcagaaactccgtcagttcatctcaaagtcctgggagtctagacagaagttcaggcttcgcatgtactggggtggttggtcggaaatttggtgaggtcggtccaaaatccagcaaggtcaatctaaactctggatcagtcccaagtttagtgcggcaaggtgaagtccgagcggtgtagtcaaatatttagccagattcatcatgacgtcaccccgaccatttggggttgggtaggccatcgggtgtgggactgggtatgtgatgggcagacagacaggcagaggattggcagtgtgcgcaggcctgggagccaaagtggagactgaatggtagtttctgggggtttccagaaccacctccagcaggagcccagctggggaaattgtgaggctgaccaagagtagtgcgtggtgctcccagacatgtccctgccacttccttgaggagacctgaaatgctactctgttgacccctacaaccccagcacattgctgagctgccagccttctgacgcctaccccctgtccagccactgggcagccagccagcatgttttggcctaaaggacagcagctctgtgcacacacgtagcacacgcttgtccccacacggcctgcctgtctgttctcccacgctcctttccctttctggccagagctgagcaggcaaagccaacagctggcctggtgccctggtgcgtggaggtgtagctgggctctgacccagctcctcaaacaggttccatatggccctcccggctgccccccactccccttccccaccttgactgtttctgagattaaaaccctttcctggtttcccagcagtggcagggaggggctgccacgctgctgttggggctgagccggtgtggaatactcatcaaatgttagctggagggggatggatttcttgggcagttgggtgagggggcatggaggggaacacatggcttgagcacaggagagacctgttggcccctgcagcccagctgcagcctctggagaagctcctgagtgtctgaccttggcaacaggacctcaagacttcagtgggaacagacagccttctgggcctctctacttctctccttgtacccagaattcctcctgcagctaagaggggtgtgatgaaagcaaagaaagggacagctgggatgggagaagccctggggggagcagggaggctcccacatgttgtaccctccggtaacactcaggccctggacagtcagcagaaattcagacatggcattggaatggggtcctggggcagccatccctgctgagcctggtgcctgccctttggtagcagggctgtgggaaagccttgggatgctgggagcagagtaatagggtgtggtgagagtaggggatgctccaggagcttgggactgcagctatctacccctggtactgaagtatttgaatattttaacagccagcttggtggtcctggtggcccccgctgaaccttagccttaggttagagcccatctctgctctagctctggcttcttccctggaaaggcttttgttgaccgtgaaacctgaagacatgcacacacacaaacatgtgaatgtgtgtgtgtctgcctgtctgcgtgaactctctgggctcccagaccttctaagtgcccagaaaacccagaagcacttgcccactcttgcactttgcctgcccttgtcctcctgccccagccccaccatgtccagcccagagactagtccagaggcacagctgatccacttctgagcccctggctgaaccatgtcctggggcttcttaactcttatccctcctccatcctgtcccagacttgtgcctgggagctggctggcatgactggggctctgaacatttggaaggcttccatttaaactgtctccctaccagactatcctcctgcccagccagccacaccattggcccagctctgggagcctatcccacatgccttggaagatcaaagcaggctccacgtccattttcagtgatgacatccggcttcagcaggtggtgatttaggatctcagctctggaaggccctcagggatctccattctggcagtctcattttctcatggagacccagagaggaggctggctgggactggaaccccagtgtccacagctcctggaatttcaccaggagaaagggaaaaagtggacaaggagactcagctaagacagactttcccttcttctcctagaacaagctatgggtggaggaaggaaaagactttggagattgttgtctaatggcttagtagtcctgcccatgcccatgccttggccacttctccgcatctacatggggtgccgggacatcatggtgcctcaggtggacctgcaagaggttgcagggcagtttcaagggcatgaaggaagcctgatctgtgaaacattttgcaacattggtgcggataagggacccgataaaggagctcaaagagcctcagtcccacctccttgcccgtctactcctgctatggtttgaatgtttgtcccttctgaaactcatgttgaaacttgatccccaatgtaacaggattgagaggtggggcctttaagaggtgattgtgtcatgaaggctctgccttcatgaatccattcatggataaaggtgttaatggattaatgggttatcatggggctgggttagttatcaggagagtaggtccattataaaagccattttgacacactcttgccctctcaccacatgattccttccaccatgtcatgacacagcaagaaggccctcaccagatgcagcccctcaaccttggacttcccagccttcagaactgtaagaaataatttccttttatttataaattacccagtctcagacattcagtcaagcaacagaaaatggactaagacaacttccttcctctcactctctctttagctgttaaagctattgctatgcacagggagagaatggaagctgattttgtttctcctctgggggtgctgtttggaagtctggggctgaggaaggagcagtcatggccccagccaactccttgcatatgttggggggtgggggatgataagggacgctgtgcacctagcctagctttgcactgccttgtccatcgagcccaacatcccttacagacatctggaagccctttcaacagtccatatccagatgttccaggtcagtgggcaactctgaattctccttccaccctctcatatctgggctctgatcattggtttctcccccaagatgtctttccagggacatccctgttcttccagctctgctcaaactctgctgaaagactttggttctctgcccttcacatcgttttcttgagacattgcattcctctgctatcactctgatcctaatagtcacagtgaacaaggtgggatacacttgattgagatgttaacaggtatttttctcctgggggtttgctctgcactccccattccagccactgagcctggattaggaagaggggcaggacagatggtgggtggaaacaatggagtcttcctggctttgtaccctgctaaccccagaccttagcagacatgagaggttgtaagggcttattggaaatgtgggagcaaggtctggaatggcagcaggcagtgaacattgaagaggggcttccctggagagttccaggaggcagcaagattgtaagagggaagggctgggtagcaagttcaggcagacagcctgcctggcttcccatacccaggtgaggcccagatctgagaaatagctcctgggccctggcaccttgcggacaagaggcaggggaaggcaggtatgagggtcagtttggtgatgagtttcaggatatgtccactgaggcatgactttgtggggcgaatgcttcagggagacgccaacatctctcagaacctggggttatacaaaagcccccataactcagactccccttggggaaaactgggagtttgccccaaattcaatgagattgtgtctactgccacaactgagtggggagctcaagccagccattaaattgctatagaaaggtaaattattttgccttgcatggctgagttacagctcaagcatggaacccactgcactaacactgacaggtcctgggcagcgtgttctttgatcctcatcattagcttcagggggtacatgctgtgattcttcccattttacagacaagaaactgagcccgctgggcgcggtggctcacgcctgtaatcccagcactttgggaggccaaggcgggtggatcacgaggtcaggagatcgagaccatcctggctaacatggtgaaaccccgtctctactaaaaatacaaaaaaattagccgggcatggtagccggtgcctgtagtcccagctactcgggaggctgaggcaggagaatggcgtgaacccaggaggcagagcttgcagtgagccgagatcgcgccactgcactccagcttcggcgagagcgagactccgtctcaaaaaaaaaaaaaaaaaaaaaaaaaaaaaaaaaaaaaaagaaactgagccacagaggcacctagcagctttcccagggttgcagaattggtatgaggaagtggtccagatgcaagcctgtgtctgtttgactcccaagtccatgctcctctctgtccctccctgcaccgctccacttagaaggatacgaagtgaatttaaacatcttagccacagtgttggtggttagccagtgggtctatgcatgcctttgtcaaaaacatgtgctccagcctgtgttttctctgtaccgtcaatgtttggattctccaaaagcccagccccaaggtatccctcctcatctgtctttttgccctcatcacaggcttgggagcagatccacaccactacagctatgatttggaaggagcacagccatcactgatgtcacaacagtccccgcaattccacagcacagtgttgatttcattgcaccacagtgtagctctaggaggtagggcaggattcgtgcccattttatagacaaaaatgctggggttcagggcttgacctaggccccatcgaggaaagtaatatggtttggatgtttgtccactccaaatctcatgttgaaatgtgattcgcagtgttggaggtgggacctggtgggaggtgattggatcttggggatggatcctcatgaatggctcagcaccatcctcttggtgatgagtgagttctcgctctgagttcacatgagatctggttgtttaaaagtgtgtggcacctcctctaccctcttgcttctgctggcaccaggtaagacatgtctgctcccacttcaccttccacagtgagtaaaagctccctgaggcctcccagaagctgagaaaatgctgatacgatacttcctgtacagcctgcagaactgtaagccaattaaacgtcttttctttataaattacccagtctctggtagttctttacaacaatgcaaaaatggcctaacaccgacagagaggagctggaactcaaaacaagttattttttttcccctaaacttggccgaaggtgggaatctcctggtgtgtttccttgggtcccaattcagaccttaaaatcagaatttcagagaagaaagtgcacagcccctgccccttcagataaagctctgttgccagagatttacaaatttatttgaagccttggaacgttttattccaaaaatctttatgctggagaaaaaacccagtgtatccaaggggtaggtgatgtccaccctccatcctactcagagccccaagggtgcctctgggcctgggtcaagcaccatgaaccacactctcattcagattccaagtctgccactcatcaacagtggccccaacaatttttgccaacttccctgtgcctcaatttcctcatctttacaatgggaaaataatgttatctgccttgcagaattgttgtgaggatcaaatgggcaaatgtctgttaagtactgagaatagtgcctggcatataagaagtgctaaataaataaatgtcattcattgggccactgtgtcttggctgatttttttttttttttttttttttttgagactgcatctccctctgctgcccaggctggagtacactggcatgatctcagctcacttcagcctccacctcctgggtctgaatgattcccgtgcctcagcctcctgagtagctgggattacaggtgtataccaccaagcctagctaatttttttttatttttagtacagataggatttcactatgttggccatgctggtctggaactcctggcctcgagtgatccacccacctcggcctcccaaagtgctggaattacaggcataagccactgtgcctggccttggctgattattttctgaggactgaatccatgtgttggctggtttaaatggttgccttggttaaaggaatgattaaatggcatcatcctaatgaatcagaaagaaaaatagtcaaagcaattgtaagatttaattggtttgtttggggtgttttaaaataatagtgatcagtttgcggtgggtgtggttgctttgcacagggtgaccagccacctctgcaggcatgagcaggctgggatgtgagcagatttgattccagcccccaccaggcttccgggagaagttcccatggaggcagacagacatcagacggaggccccgtcgccggtgtttccttggttgctcaggccctctcagagctgctgtcaggtcagatcctggaaaccctgagtggtttcccagctgaggcctttgagtgctgctagtttgttctgccctgtttcctctgggggagctgagcaaagggatggattattcacttccctcctctcttcccctatggggttctttttagaaggggtggcttggtcagctctgggcaggaagggtgatgagggaggataaggccaatcattttccacctcccactctcttttctgagtgccctaagaagtggctggacaggggacatccaggacctggggtggttccaggacggaggcttccggctgccatggttgccctggggttggctggagccaggacctctctggagaggcacagagggaacttcaggggaaaccacatttacatccaggtgaaatcagttaggctgatcatcaaaggggtaggaaggatcccagagaggaaatgagagatctggtcatgttgcttaactccctggtcagtggcttctattgccttgaggataaggtctccaatcctacaggcccaccccgcctgaccaggcagcatacctgccttggcatgtgagggcccctgtgccgtgagctcagctccagacccctccttgatgctccttctgcctcagggcctttgcacactgttgctctcccccgaccctttaccttctgcaactccttctcaagcttcaggcctcaggtgaaagtcactctttgtgagacgccctccttgacattcctcccccagcccctgtctagaccagatgaggatatttgctcctccccttatcgtgtatactccttcaatttctccttcagggcctacgctcagttgtaactctttatttagtgtctatcattcctttttgaagaggacagtagccatgtctgcctgattcgccatgacattaccagcccaatgacagggacacagtaggtatttctaagtatgtggtaaatgatggatgggcattttggcccacccattctaacgggtgccttgaagatggcagaagttacagggaaacagcatatggctttgcatttggaagatctttctagtagagttggccaagaactaaatgaatatgttgctttagggagtagtgagctccctgtcactggaggagtgcaagctgaggctgagtgactgtatgtggaaacacttaagaaggaacctgagtttctggtgtggagtgagtatagaccctggaacaatctttccaaccttgtgaaggtgagattctaaggtggcaatggggtgatggggatggactgacatcttctgaagttccctctgtgcctctccagagaggtcctggctccagccaaccccagggcaactatagcagccagaagcctccatcctggaaccaccccaggtcccggatgtcccctctccagccacttcttagggccctcggagaagagagtgggaggtggaaaatgattggccttatcctccctcatcacccttcctgcccagagctgatcaaaccaccagactggcatggactggttgccatagaagtccctggttttctttagcccagagagggacaactacctccttgtctctggtttgttcctgagtcactgcccaaccagtaggtgggaacttctaaagtcagagtggccaacccagtgcccataggggccaggcttggaacatgggtaagtgggaaacccaggtgcctaaaaatgagggtaaagaactgtggcaaggacacatggttatcagagaggctacagggactggtggggactatggcaaattggagggaacagacccaatttaaaggggtcacctcaggccctggagagatgtaaacctgagactgtctagatatttagctttttaaagagaagcaggaaatacgaatttttatataaaatctaattcattttctttttttctttttttttttggttgagacagagtctcgctctgttgcccaggctggagttcagtagcactatcttggctcactgcaacctctgcctcccaggttcaagtgatactcctgcctcagcctcccttgtagctgggactacaggcgtgtgccaccatgcctggctaatttttgtatttttagtagagatggggtttcaccatcttggccaggctggtcttgaactcctgacctcaggtgattcgcctgccttggcctcccaaagtgctgggattataggtgtgagcctccgcacccagccaaaatttcctaattttcaagtgttggctacttatgagccagacaaaatccatcttgaggctatatttgaccctctgttctgattctaagatctggggatgacttctccttgtccccaaaacaactgaacaacttttcctttcctaccagattccccttggcccctgcagtcctgagtcagaggccccagctcacagctctgtcttgagagcatctcctctcctttctgaagatggccctgaactgaatagtgagagactctagccaggtctgctctgcaaggctgatcatccatcctccagctgctgggactcttagctgtggatggctcacagctgcattctggagactgcctccttctgggtcatatctgctgccatgggagactacaaccaatgacaatctgatattaggatatgaaggcccaccccgtgcctcaatttgggaccatgctggaggaccatctcagctgcagagcccccccataggatggctgaggcctcaggtgcaacctcatcatgattcacctccttcctttcccagtcctgccttgcttggctccttttgcagggagcacctccagaaggcctaaggaacccaagcgaggcaggactggttctttctgcacaaatctctgcatcagtatttccaaagagtctcatgtgaaacacgcagcctacccactttctcagagacctaatttttttcttatcaaaacttctctcaggaaaggctctgataagcttgttcacatggaggtatccgtggttgataatagctcaatggatttatttttccagagtcatctgctatatatttatgagaatcttatgtcgaagggtggatgaacttccagggtaatgagggaagattggggcatttctgatttatcagtgaatcaggggctgcaccatgccaacagcctaaagtaagacagggtgattctaagcctcgtaaatgttgattggtgaggctggctcttgagatctgccatcttggggcttttaaagagtgaatcagcaaggtgtgacaaacagggacccggctagctgtgtgactgctcctttctggagcccagtttcttcaactgattgatggtaatattcactataaaattgtatccacacatgagcttaattaagatattaatatagtcatttttggacacaccggaaagttagatgtaaatgccttggaatggagactcccaaacttcctctttccatagcacccttagtgtcacagtaatttttttattacttatgtgcccccaagaccaaaagaaacaccaaagagatccattattaagtagttaggtctaaataaatcaatgtgtatgtctgtcctaacaactttgtagccatctaaaaatacacataaaggaaaagatatttttattccattcttaaccacagttatttactaatgggatgtataatatgttgggtactgcatggtttctcaaaccttggaatcatatcggatgccatcacctcatttcctggtccacaatgatttgcacatggtatttgctttttatcacagcaaccaccaaaacacttcgcaaagatatgatgtcactgaaaggaatgtagtgggccctaaagctgaaactggtagtgtgcggagcatccggcaggtgtcactgtacttcccacaaaatttaaaatatccctgcagccactctgtgaattggcgatggtgcccccaggggcctcagtgcaaggtttgggagcagtggcctcaggtattaactatggctgtattcagagagtaaacttttggataatctttacttctttctttctactttttcctcgtcccttacataacaagcatgtaataatacttaaataagagccaaatcagagagatggttgtacaacattgtgagtgtattttaatgtcgctaatgataaattttttgtcatgtgtcttctaccacaaaaaagctattttaaaaaatcagagaggccaggtgtggtggctcatgcctgtaattccagcactttgggaggccgaggtgggcggatcacaaggtcaggagattgagaccatcctggccaacatggtgaaaccccgtgtctactaaatatacaaaaattagctgggtgtggtggtgcgtgcctgtagtcccagctacttgggaggctgaggcaggagaatcgcttgaacccaggaggcggaggttgcagtgagccaagattgagccactgcactccagcctgggcaacagagtgagactccatctcaaaaaaaaaaaaaatatatcagagaaaaatgtaagatttgtatattttttaaaccccaaacccctcagggaagttggatgggataaggcaaggacaagatctatgagctgggatgctgtagggcgtcccagcagccaggctctcagacttgcatccacccagccctgcacccgcccacccagctatccacaccaactggctgcctgcttcccagggaaacacacctgtatcagagcatttaacccaccactctcacattccacctctccctggaagaaaaacctgtttgccattctgctggctggcttccttgttggtgcaggtagaaagccaggctctgggaacccagcagacatgctgtcaggagaacttcctttgcagtgggatgtgagctgaggcagcgggagaccactggtttgtgttatatcctctgactcgacagtgagcacagggactctcaaatgtgacatttctcctattggtgctatctatgcctgtcctttcagccaggtggatcaagtcatttgctgcatcgttttacattgtggaaaacctcctttatgtctggcttaatacgacacgctgaggttcccgtacctgtttctgccttcaaactgttcctgcgggctgtttttggaagaaaatctggtctcatatggatatgtggttggaaaagggaagaccttgtgggaccccctgaaatggccaggggaccttagaccatacttcgagaatcatcacctttcagcaatggtttaaataagccgagaaagctttcctcaccttcatgtaacagctgaggaaactgaaggctctgaaaatgacatgatgttgtgaagatcttaccctgctttaatgcaggaggcaaggctaggaactggctcttctgtctcctgctttggggctatttccattactaaaggaaacaagattcatgatgctcctaaagtacagcctccttaagagttcctttcatgaaggttagtggaaaaccctaagtttttatttacctgaaatatatattttttgaaacgatagttttggaagatagttttgctgcatataaaactttgggctgatgattaattttttcctcagcatttggaaggtatttccccctatcttttggcctctcccatggctgatagctggcaatctaattgtaatttttcggtagatgagtggtcttttctgtctggctgctttcaagattttctctttatctttggtgatataaaatctcccttcagtaggacctggtgtggatttctttttatccattctgttggatgtatgatgcatatacattagaaatgtgtcttcctttcagtgtggtgattcctcaaggatctagaactagaaataccatttgacccagccatcccattagtgggtatatacccaaaggattacaaatcatgctactataaagacacatgcacacgtgtgtttattgcggcactattcacaatagcaaagacttggaaccaacccaaatgtccatcaatgatagactggattaagaaaatgtggcatgtatacaccatggaatactatgcagccatagaaaaggatgagttcatgtcctttgcagtgacatggatgaagctggaaaccatcattctgagcaaactatcacaaggacagaaaaccaaacaccgaatgttctcactcataggtgggaattgaacaatgagaacacttggacacagggtggggaacgtcacacactggtgcctgtcgtggggtggtgggctgggggacagatagcattaggagaaatacctaatgtaaatgacgagttaatgggtgcagcaaaccatcatggcacatgtatacctatgtaccaaacctgcacgttgtgcacatgtaccctagaacttaaagtataaaacaaacaaacaaaaatgaaatgtgtcttcctttatctgtagatctgtgtatctaattctcaagcactctttcaaaatgatccctctcttctattctttctattgtctcctttcaggactctgattacatctgtgtcatatactttattctattgtctacatctctgaacctttcaagtatactgtttctctctctctgttgttttcagggttatttctttctttctttccttttttttttttttttttgagacagagttttgctctgttgcccaggctggagtgcagtggcatgatctcagctcacggcaacctccacctccagggttcaagcaattctcctgcctcagcctcctgagtagctgggactacaggtgggtgccaccacacctggccaatttttatatttttagtagagacagggtttcgccatgttggccaggctggtctcaaactcctgacctcaagtgatccacctgcctcggcctcccaaaatgctggcattacaggtgtgagccactgtgcccagccagggttatttctttagctctatcttctagttcatgaattatcttttcaactttgtctaatctgctgcttagccatttactgttttctcttgtttgtttgcttccaatactgagggtgcaattgtcattttgagtgagaaatgctttgttttgaagggctgtcttataaattatgagacttttatcatcctttagtttccccaactaaaagtccaagttcaattaatgccccagacctttccaaataacatgaggcagggggaaggcaagaagtaccacccttggctgaaaacaatttgagggaaaataaacactaagttcaacccaaaatgtgttagctcagactgccatagcgaataccatgcagtgaatggcttcacaacagatttatttcttgcagttctggacactggaaagtccaagatcaaggtgcagcaatttagttccccgtgagggctctttcctggtgagaaaatgaggaccagcttctcactgtgtcttctcatggcaaagagatctctctgtcctcctcttcctagaaagctgccgtcctattagatagtgccccacccacatgacctcatttaaccttaatgagttcctaaaagctcatctccaaatacagtcacactggaggttagggcttcaacatatgagtttgtagggggagacacaattcagttcatggcataatgcaaatcagaaggcaaattttggtatatgatacatgcaagattataaaccacctatgaaggtgtagacctagagctccattcttaaataaatagataagtaaataggagaaggcactgaatttaaagcataatctccaggcctggcacagtggctcactcctgtaatcccagcactttgggaggcggaggtgggtggatcacaaggtcaggagttcgagaccagcctggccaacatggtgaaaccccatctctactaaaaatacaaaaattagcagagtgtggtggtgcgtgcctgtaatccgagctactcaggaggctgaggcaggagaattgcttgaactcaggaggtggaggttgcagtgagccgaaatcgcaccactgcagtccagcctgggtgacagagtgagactctgtctcataaataaataaataaaacaaaacacaatctccagtcatcagggagtttaaagtctatttgggaaaacaatataaaaatctgaaagttaaaaaaaacaaagcattaaacaaaagtttgagatccatgtagaataaatgccacagggtactctagcttagggtaaagaaacagcagctttcttaatgtaattaaaatatgagctatggcatttctctccatctattcactctctccctgggagagctgatagagaatgctggaatatatgtgatagagcatccacatttacctgaatatgagctacctggtacataatttcatactgatgcctcctctatatacgtatttaagagctataccttatgtctaaaagctttttattttgaaataatttctagatttatagaagagttgaaaagacagtatggagaattctctgtaccattcttccagcttctggtaatattagtatcttacatagctatattgtcaaaactaagacattaaggttggtaaaataccattaactaaactacagagtttatttggattttctgttttccactaatgtctttttgtttttctgtttcaggatccaatcaatgacattacattgcatttaactgtcatgtctccttaggtccccagtttgtgatagttttgcagcctttctttgtctttcatggtctggatgattttgaggaatgctggtccgatgttttgtaaaacagcccccaagttggatttctctgatgttttcttatggtttgactggagttatggacatctggaggaagaataccacagaggtaatatgcccttcttatagcatcccactagagagtacatgatatcaatgtcttatcactaatgatgttaaccttgatcacttggttaagatggcatctgccaggtttctccgtgatcagtgttactatttttccctttccctagctattacttagaagggagacataaatccagcccccctcaaggagaggagagctaagctaaactcccgtacagaggtgcatcaaagaatttgtggacatatgttaaagcccccacagtaattaataagtgtttgaagggtgataatttgaagctatgcaaatatcctctttctgtagtttgcccactaattttagcattagtcaatgtatcttgactgcagacgtcattactgtcatcttctaattctctattgtcctcattcactaatcagaattcttctattaaaaaaagggttctcttggccaggtgcggtggctcatgcctgttatcccagcactttgggaagctgaggcgtacagatcatttgagaccaggagttcaagatcagcctaggcaacatggcaaaaccccatctctactcaaaatacaaaaattagtcaggcatggtggctcacacgtgtagtcctagctactgtggaggctaaggaacgagacccacttgaacctgggagggagaggttgcagtaagccaagatcgcaccactgcactccagcctggacaacagagcgagaacctgtctaaaaaagaaaaaaaccaaaaatcaaaaacagggttctctcttctctagcatttatttattattaaatcatttatttatatcagattttttttgttgctcaaattgttacagctttggctataggaagctcattcagtgtggctcttgtgccttttgattttttttaacataaagtacttccttactttctggcacaaggtgctttaggtccatctcatattttttctgcccttgacatagcatcacacattttattgaggttccttttattggacattggcaattagaaaccaatacctgggcatgaagtgtccttattgcccctgggtgtcattgcttctagttcctctcagtggacagagctagaaaattatgcatatatactaatccatgtaaacacatacctccatctaccaggtagctttctatctatctactaggatccgaatgtttgtcttcttcaaaactcatgttgaagcttaatccccaatgtggcagtattgagaggtgaaccctctcagaggagattggctcatgagggctgccctcatgatagattaattcactcatggattaccggattaatgggttatcatgggagcaggtctggtggttttataagaataggaagagagacctgagctatcatgctgtgcacagcctcaggactctgcagagagcccaccagcaaggaggctctcaccaaatgtggcccctagaccctggacctcccagcctccagaactgtaagaaatacatttcttttctttataaattttgcagtctcaggtattcagaacagatagcaacagaaaacagactgagacactatttctctctctctctttctctatcaaaataaatataagttcatactgatatctcagactccaacccaacatacattgagttcttaatttggacaatcatacattttttctccaacagttcaattgggttcatttgtagtctgtcacccattttaagtgtaccatctgttgagttttgacaaacgtatatacaccgtgtaactgtcaccaccacaatcaagagagagagcatttctatcgccctcaaaggatccgttatgccattttccaataaatcctcaccccagccccaatcattgtcttacatcactatagattagatttgtcttttctagaatttcattaaaatcagaatggtacatatgtattcttttgtgcctggcttcatttgttcactgtattaatttcctaggctgctttaacaaagtactacagactgggtggcttaaaacaacagaaatgtattctctcacagttcaggaggccagaagtctgaaattatgttgtcagtagagttggttccttctgggggctctgagggagactccatcccatgcctgtcttccggtttctagtggttgctggcaattcttggaacggtttggtctgtggctgtgtaaccctaatccctgtctccattttctcatggtgttcttctctattcccatgtgcctttcaggaatttagcataacttcatcttaacctgattacatctgcaaagactatttccagataaggtcacgtgtacaagtaccaggggttaggatttcaacatatcttatagggggacacaattcaaaacactcagcataacatgtgagattcattcacgcccctgtgtgtacatgtagtttgttactttttatggataagtagcgttgcacagcatgtatataccacaatttgtttatccattcactcgttgtgaacacatgagcagtttcctgttatggcctattaggttttggcctgttatgaacgaagctgtcctgaacattgaggcgcaagtcttcatgtggacacatgtttacatttctcttgagtaaattcccaggaatggaatgactgggttgtggagtatgtacatttaactctttaagaaattgtcaaactttcccgcaaagtggttgtagtactttacattcctaccagcaacttaagagagagttccagttgcttcacatcctcatcaatgcttggtattgtcaatctttccattttaaccatctgggtaagtctgtggtgggaacttaacttgttgtggttttaattcgtatttctcctacgactaatcaagttgagcaacttttcatgtgtttgttgtccatttgcctattttcttctgtaggatacagtaaattcctcttcaaagtttagcctgttaacttcctttaaaattcaagagggagaaaaactgttaagtacaatgagttctgagttcctcttcaaagaaccaatatgtcagtatgttcagcttccctgttctttgttctccattttaaaatttaacttccttgttctttaccctccttgcccctagttttagtaaacaaccccttcctagcctctatcacctgttttgtccttaggcacccttagtcacctgctctgtaactgtccttcccaccgaaactactcaccctgccactctggctcatatccctgctctctttaaaacagccagtcggaattagcttagactgtgtggtccaaccctaaccaataggggaaagacacagcaatagggactagctgcattaggataagaacccctttcccctctcttgtctggtgtgctcttgccattgctccaatttacccaatagaagtaaattgccttgctgagaaaacttttgcctgagtgctattttcactttgtggcaccgagcatttacttccaacacttccatgaagtgtctattcaacatttttacccatgttttattgggttgcttttcttattatgagttttgagagttcttgatatattgtgaaggtaagccttttgttggctatacatattgtattttttccctgtgggtggcttgccttttcattttctttcttttttttttttttttttttttcacagggtctaggtctgtcacctaggctggagtgcagtggcacaatcatggctcattgaagcccagacctcccagcttacagctcctggtaattgttccttctcctggtgttccttgctcagccttgggatgctgcacagactggaaggttgcccaagaaaccctttcccctcaacctcctaagttgctggaaccacaggcacatgccaccacacctggctaatttttttaagtgttctgtagagatggggtctccctatgttgcccaggctggatctttacattttcttaagatatctttccaagagcagaaaaaatccattttaattaagtccaacttatgaatttttttatttcatggtttatgctcttttgtgtcctaccttaagggcaaaaaaactgtctcctatatattcttctagaagttttagtttttgtgctttggtctgtgtccattttgagtatttttatgcgtggtgtgaagcaatgaggccgaagttggatttttttttttcctctatggctatccaattgctgcagcaccatttgttgaaaaggaaattctttccacattaaagtgtcttagaatctttgtcaaatcaatttattaccagatgcatgtgaatttatatctggattttctattctgttctattgatctataaatatgcctattcttatgctaagattatatgatcatggttaccttagcttaaaataagacttgaaatcagtttaaatttctaactttgctcttcttttcaatactcttttggctattacagattctttgtatttccatataaattttagaatcagcttgttaatttctacccaaaaaaagccttctgggattttattaggtttacatttgtgaaaggaaaaaataaatcttggggaccccaaatcactaagctgaaaggaaaagtcaagctgggaactgcttagtgcaaacctgcctcccattctattcgaagtcatccctttgctcactgagataaatgcatatctgattgcctcctttggaaaggctaatcagaaactcaaaagatgcaaccatctgtctcttatctacctgtgacctggaagctccctccccacttcaagtgtcctgcctttctggatggaacaaatgtacaccttacatatattgattggtgtctcatgtctccctaaaatgtataaaaccaaactgttccccaaccacctggggcacttgtcaccaggacttcctgaggctgtctcctgggcgcgcatccttaactttggcaaaataaacttcctaaattgactgagatctgtgtcagatatttggggttcacacattaaatctgtagaatagggaataattgacatgtttacagtattgaatcttctgatctatgagcacaaaatagtttccatttgtttggtagttttcagtgtgtaggtcttacacatatttcattccatttatttctaagtatgtttggatactattgtaagcggcatttttccacttcaacttccagttattcattgctagtatatagaaatgtaattgatttctatatagtaaccttgtatcctgcaaccttgctcacctcacctatcattttagtaacttctttatatgtttcttgagatttccaaagtacgcaattgcaatgtttgaaataaagacagttatacttcttcttttctgatctggatgcttttattcttaacttattgcagaggctaagacttcctgcaaaatgttgaacagaaataatgatgggagacatatttttcagtaaaagatgccaaaataataggatagctgtatgaaaacaaataggtaaagaaacaaacaaacacaaaaaacccacaaaagcctcaatgattcctagccctgtgtgagcattgggattttttcagcttacatctcctggtaattgttccttctcctggtgttctttgctcagccttgggatgctgcacagactggaatttagccaaggatttgaggggattccatgcagactcttggagccctttctctgcataacctccttttctctggtactctgccctgcaaattgcaggcatctcagcctccccagacttacatttcaatctcttcagctcagtgagaccactgaactctgaattctcccaccctgttttgcattccagaaattgcctccatgcagaaaattggggtaaggttgatctgatctgtttgtattctttcaagtgctgggttttctattaacctacatcttaaaacagttgttctatacatttccaccccagttttctagttgtttactaagggagaaaaagtctagaccttgctaccttctcatggcatggtcatttttgttagtctcctattctttgctcatttttttttttttttttggttctgcgaacccagaaaatctgagacaggcctcaggtaatttagaaagtttattttgtcagagttgaggatgcgcccatgacacagcctcaggaggtcctgacgacatgcgcccaaggtggtcagggcacagcttggttttatgcattttagggagacatgaaacatcaatcaatatatgtaagaagtacattggttccgtctggaaaggtgggacaacttgaagcaaaggcaggaagactcaatgtgggggaaggagcttccaggtcacagataggtgatagacaaacacactcttttgagtttctgattagccattccaaaggaggcaaatcagacatgcatctatctccgtgagcagaggagtgacttcgaatagaatgggaggcagatttgccctaagcagtttccagcatgagttttccttagtgattttgggggcccaagatgctttcctttcacagttccatcttgtatttctttaaatatttcaaacagttatttaattgtctatatctgagaattccaacatttgtagtctttaaggatttaaatctgtggtgacttgtatccttacgtgtttgctaatttgtgattgtgacttagtctttgggcatcacaagtctctcaggtgggaatgccttcctctagaggtgatttttgcttgtttggctgagagtcagagaagtacttctgacctggaacctctgtcccagactttatttaggagtatccatttcagctcctccaacttgcaggtggctctctgctattgccaataaatgtatttaccctcaggtcaatatcactgatatggacagaaggcagggaaatagtgggtataagagtgtggggtccctggtgagggctccatcctcaagcctggacctgcagccctaaatgagacgatgcattcctgttttcccacccgaatgttgccttttccaaaaccactctggcctgccacgcccccaactccgtacccataaaaacaccaaactccactggaagaggagcagagtggtgtggcagaggacagaagagaagtgtctgaatgttgagagaagaggcggctagacattggagactacggttggagaggagttcagctggggatgttcggagaaggaagattatcttcccattccatcccctttccagctccccgtcccattgagagccacttccatcactcaataaaatcctctgcacacaccacccttcagtctgttcctgtggcctgattcttcctggatgccagacaagaatttgggatgcactgggtgcggaacccaaaaaggctgtcacactgactcttcactgagctgtttaacacttaagcagtccacggacggcaaagctaagagcattgtttgtaacacataccctctgggactccagaggttgagggcaacccctagacactgccgggagctggtatggggtttgttcctgccagtgcccaaaggcacttgccctggctcctgcacccactcacctgtgtacttccccaactgcaaggcgtttgagggtggtgtccaagtaaatgagccacccctctcacaagtcccacaagggggtcaagggaactctcccatctcatcacctttgggtttcagctccttgtgagttctttccttttttgaatatttccctaacattctgcaagctcagaaatgtgttttaaaatatgtgttatcacatatccaggctctagttctttagcaagagggcctttctaaatatctagtttgccataatgttggagttagaagtcctagtcatccactctctatccatcctttcatccatctgtcactgatttttctctgtattccttactcattctcctttagtcacctctgttgtccccagttctttaatgtttcagagaaaacagaagatcattccctttcaggactgacacagttgagaaaacatctctaacacactgaccctccctaaaaatgtccttcctcacttgccagccctcacctcctgcatggccatgctttatcctggcatctcaggaccagtgttggaggagctttcagcaacaagaaagtgccctgctggcttcaccctgtgattgtgaccctatgacctggagttcatgggcccagggtcactctaatggggttgtggggaagggcacagagccaggggtgggtagcaccagggtggggacatgctgggatgtttgggtcttgagaacagaatcagcaggtgcagcctggtccagaacagccctgacaacatatggtcccagtctctggaacaagcctcgcttgttaaaagaggaaaacaaaacagcccatccttctctgcgtatggttaatgcatgtttgaagctgtgtgacttctcgagggtcccagtggtggcctctgtgtagtgtttggtcaggctggctgccagcccatgccctatccctggcacccccacccctccgtcccagtttctgtggcagtaaatcactcacatgctctctctgaagggagaggtctgggacctcctgggctgggcagacagagggctcccggtacaaacatgctctgcttcttcccaccagcagacaagcggcctctgcagttgaaaaggatttgcggggaggtggaacagtgggggagattgttggggtggtaaaggaagagagataatatgaagcttgctctgtccagaggcctgcgggataaggtgggaaccaaggtcagtatttccttggaaagtcagtacttttcaaacttaaacgtgcatgggaatcacctggaggtcttactcaggtgcagattctgatttgggaggtctagtgtggggcctgagattctgctttcctaagaggctcccaggtgttgcccatgctgcggggccagaggctgtaagcagcagggctaaaggggcacttgagagaggctgggtggagctgcaccacagagtcacttggaatgctttaagatattgtctggccccaccccaatcaattgaagcagactctgtgcttgcaccgggacacctgtgtgttttcttttttaatgccccactccctatctaccccaggtggtttgaatatgcagccaggattgagaaccactaggctagattatgggagatcattctccactttaaaattagagatctgtgaccacctaatttgctgtcacagtgggatggctggaaatgacttaacattgtgctcttcccaggagcagcttcatattcaccaagggttgggaggggagttttgcttggaaggaatgacaatggcggaactccagggggagaacaaaggactggccgcatcttgccgaaatggccatgctatgtgatcttgtctcagcaatttcatgccttgggcctccgtgtcttggccctgaccagcacaactcctgttttgttctgtctgttcagcccagaattcccagagggcttggagctttctactgatctggaaggttctcttcccctctcttctcttctgagtgaaaaaggcagctgggaggccccctgcccttctcccctccagtgatccgaagccatggctgagaatagtgggaatgaggtgctaatgcccccgtcttgagtagattttccccccacggcacacacatctggtttccattttcttctgcagcaggccccattgagcagagccttcctctttgaatctcctgaaaaatcatgtccagaggccaggttcagcccccaccctgaccccagtcctcaatgcagcaaaattcctttctcagggacccttggcccagtcttccccatggtccttgggaggcaggtggggccctcaccagaggggagagcaaaaggctggggtggtgtgggggacattagaggagtgctggctccctggagaactggggaagtaggaaggtttgggaacacctaaaaagaacaggaggagtgcatgagccaccaggaaaaatgagtgcctactgcctccagctgggaggactgcaagctcttcttgctctcacccagacccctgggcacagagacagtaagggccaagtggggatgggatggggaattttggggtcagattctaccttaagagatgtcagggtcataaagacaacacactggtcatgctcattgactggaggatgtcccggtgtcccttctgtcttgcatagcacactgtggtggtcaggggcactggctctggatagcacaggactgggctgaattttggcgctgcactcaccctaggtgggtcatggaacttctgagtcagtttaatcttctgcgaatttggagtattagagtaaaaattgaattatagtagataaacacaagcaaagcattcagcctaacacataggaagcacacataggaagttaataaatggtagcaaacacataggaagttaacacataggaagttaataaatggtagcaaacatctattatccattcatctattcacttaaccacatattgacaatttgcctatctgcccgtctacctctctgcctgtccatctctctgtccactcatctctttatccatccatccatccatccatccatctcttcaaccagacatccattcatccatccatcatccatccatccatccatccatccatccatccatccatccatccatccatccatccaaccaaccatccatccaatccatatgatggcagggatattagggttcatctgttccagcaggtttcccacctgggaagcttgttagctgggctggtcctagaccctccctcagaagttcttattttataaatctgtgagggacccaggaattcacatgttaaacaagcttcccaggtcatgttgatgcaggtggtccttaagcccctctgaagaaacactgacctagcacctcacctcattttaccaaggaggaaactgaggcagagagggcgacttcctgtctgggctttatcccgtcccctactgcccccatgagtgtggtgtgtgggggcaagtgtgaccaagagccctgggagggcagcggagggcggttggcagcccatcacgcagcccccctaccctctcacccacccctgcccagagacactgccctgactcccacactgagcctgtcagggaccagggatttattcctgtgggccggcttttcgccctttctttcctgggttatttatgtcccttgccttttatctcccgcccggctggcccgcaaggcccattatgtcgctttggctgtggccgcatcaatctccagccccgggagccaggcccccagcccatctcatcatttattttccaggtctccctgatgctcagccggcagctgtcctggtgtgtggatggccctggctggcgtccttctcagagaggaccattgttggtgggtcttgggactgtcgggtcagatgggccacgggcagcttgtctggggcctaggagtgctgtgacctttcaggaattagcatggcagtaggggcagtgttctggttgtcaggacttcagagtcccagcctggaccctgccagtgactccctgggtgatgttagacaaggagcagtaactagataggacgatccaggttgtagcttccagtgctcccagatgtgtgacaagtgcttcccaaactatgtcttataaatgtgtgctttttttttttttttttttttttgagacggagtctcactctgtcgcccaggctctggagtgcagtgtggctcactgcaacctctgctgcctgggttcaagcgattctcctgcctcagcctcccgagtagctgggattacaggtgcctgccatcgtgcctggctaaattttttttgtatttttagtagagacggagtttcactgtgttggccaggatagtctcaatctcctgatctcgtgatctgcccgcctcagcctcccaaagtgctggcattacaagtgtgagccaccatgcctggccgtgtcttataaattaataaacatttattaaaaagtcagagacaattccataaccaaagtttggaaaactctagcttgaacagaggtgtcgtgagttgaatggtgctccccaaaaggtatgtccatgtcttaaccccaggaacttgtgaaagtgaccttatttggaaagagtgtactcggcagatgtaatccagggtctcaagatgagattaccctggatttagggcgggccccaatccaatgatgagtaaaaggtgagggagacctgcagggtagaggggcacgtaaggagtgaggcagagactggagtcatgcagccccaaaccaaaagatgcctggagccatcaggagctggaagagacaagggaggattctcctctagggccttttgaggaaggacagtcctacccattccttgatttcagatctgtggcctccagaatggtgagagataaatttctgttgtttttaggccatcacatttgtggtaatatgttatggcagccctaggaagctgatacaagagagaaacaatgttgtatgctgcaggacttgtcagggcctttagtaacaaatgtgcattaggaagcactagggctgcagcataaaactgtgacatgggccagtcgcagtggctcacacctgtaatcccagcactttgagaggccaaggcgggcggatcacgaggtcaggagatcgagaccatcctggccaacatggtgaaaccctgtctctattaaaaatacaaaaaattagcggggcgtggtggcgggcgcctgtagtcccagctactcagaaggctgaggcaggagaatggcatgaacccgggaggcggagctggcagtaagctgagatcgcgccactgcactctagcctgggcgacagagcaagactccgtctcaaaacaaacaaacaaacaaacaaaaaaacaactgtgacatgaagcacttgactggggagctcccctcaggacttgtgtcttaaagagcacattttgggggatgctgacctatgacttggtgggagaggttggggaagaagggaaagtgtgggggaacctgcttggtctaatctttttggaaatgaggtgggggtcatggagtccggggctctgtcccagatgcaatgaggtgagggacttaggatcacaggcaaaggaagtcaccttgcagctcaatccactcccagaggaagtttgggttagaggggtacagggaggaagcagctggaggaatcctcccagcacacctttccagcctgcaggccaggccgctgcctgtcctgaaatcctctcccgcctgccaaggacagggtggtgggggctcctgcaccctagatgtctctattctgaagagccaggcttgtttgcaagcccagggagctaagagttaacgataatcaccataatgataattccaggtatgatttattgagagattacccctgccagaacctgtgctgagtgctttatgcatattaattaattaattcatcacaactgtattagcccatcttataggcgcagagatggaggcacagagaggttaagtagcttgctccaagtcacacagctagtaaatgggagatccaggatttaaatccaggttgtctgacagctctcaaccatgaagtcacactaccttcccccagatgcaggaactctaggagagaatgctcattcattcattcactcaatattattgcttgcctgcgccctgccaattgctgggccaagccttcaggccacagcgctgagcctgggaattccgggacccaaagagtccttacacagcatggtggggaggcagccaggacaccgaagatggcagtgatggtagtgctggggacaatggccacagggtgttggtaggggcttccaatccagtctcagcgctcagggactgtgccctggactcagtttctcttttgttcactgaactaggtattcacgggcaaatgggggtcagcccaaaggaagggggttcaagctgaaagacgtgagaaggcttcatcctgaagcagcacgctgtcttccaggagctgggtctacttggccatagctaagaggatgggatggggtttgggaatggagcccttacccacagcctgcaagggaagcaggtggtccagaagtctgaagtaggcacagatgagacactcagcctccagtctccagcatcactccctcacacgaggctctgccgaatgacaatagctccatttatccacacattttgcgccagacattttgctaagcgtgttacataaatggccttcttcaatcttcactgaaactccatggggtgcagttactgctaactccatttaacacaggagaaatcaaggctccttgtggttgtgctacttgactgtgctgggggttgcacgtggtctgttggacagaggcctagatttaaccagggatgacattcaacatgtttcacaataggggctttggagactctgacccctcagttaagatgccacccagaagcttgctggtgtgcaccggctgaacgtcaactctacttgtaaccaaagcaagcacttggaatcatgctgggaatatagtaagcaccagaaaaatgtagctattccttttcttgttttctttattaatcaccctgtctgggactatggggaaagcgggccattctgttccatctctcctcccattttttttctggtatatttttcaaagctcttatttacaggctattttgctgctcaagaatcttcaattgctcccctttgcctacagagaaaactctaactcctctgcccaacagtcacgggtccccttggctggctccaaactccctgtccaggtggacttctgcctgctctctaaggaggtccttctcccccaggctgcctcttcgctgtgtcccgatgcgccatgtgctttcctccccggggccctcactgagccatgacccctcctgaaatatctcctcaccctcttcactgacctgacttcaaggctgctgaaattctgcctccaccaagaagccttctgaatactccggcactcagagggctcccatttttaaatgtcctgcagctctctctgttctgctaacacttgttcacgtgccatgtggcaactatttttggtctgcttcccacagcccaatcacaaaatcaacctcttggtgtcaggagtcagcacttcccaaacttttatgtgccgtgaatcacctggagatcttgtgaagctgcagctcccgggtgaggaggcgtgaggtggggcccaagaccccgcatttctaacaagctcccaggcgatgctgtgtcctggggccacacttggagcacaagggctgagccatccggcagagcctctgtcccttggttctcagccctgggacctgagaaaaatacttctcctgggccctacctccagaatctctgcttattggtggagagcgaaccaggtactggtgtgtttacagagcttttcaggtgactgtgatgggcagctaggatagagccactgagctggcaccgtccctcaccccaacaggtgtgcgtttttatgtggtccaggattctcagattagaccctgttggagggcaggaagctagttccttaggcatggggcaggctggggcagccagagccctacagtgtttttgtgggtgggtgcccactaaccactagggaactttgaggggatagagagagagcatcctccctgcacggtcccagccaaaggcatctctgaacccaccgacaccatccaccacaaggcacagacagttgacaactcaggagggaccaggaggggagtctcaggagcggtttggccagaagctccctcctcctgccattcggcctggctgggcacctgggaaccaaggactcccctcctggcacccaggaaaccgccactgtgccgagttagaaggcacagggcgccctctgctgggaggtttgggtttgagcatttctccccagggactcaggtagaatggggtaaatcaggggagggcagggagggctgttctgtgtctcttctttgtcttcctatttcagggtctgcagagccaaaatccagtttagacgaaggatcgcaggttgagactctgaagggtgggacggatttgctcacgcagccaaatcacactgaggctctttctgcccgtttcaccttttccttctcgttatcatcaccgtcagcaccgatccacctgcactggctcaggcttcgaggcaacaggattgaaaacacagcttttgttctgtgtctccaagaaggctcagctgctctgagcacccacagttcctgatctggactcccttgtggtttgtaacgcacttgagtcaatgtggggtcagtgttaggagcagtggtgatgagagttagaattcagtctggggctaggaccaacgggcattcttacaaagtcagggatcagactgcatccagagtccaatcaccaggtaagcaccagcaggtaggtccggctcactaaaggctatggccaagcctctggccacagtgaaggaggcccgtgtctgggagaccaaggcagaagaagaagaccgagaaagcagaacatgtccctgtttcctccagctcccccaggatggctgctctgagctttcatgatgctatgggcccgtagttcaggggtcagcacgcagtgcaccaatggccagccctctgggcttgactccatggtgggcccaccctgtggctctctctcagggtgcagtgtcttactgtaatatctatcaactttgtcataaatgcatgttcttggcccaggggagggtgagctataccgaggggaaggggtccagcattattttagggtggagagtcagcatgtgaacacgtgtggtcattgatgctactgtagaccaggggcgtgaaacctggggcctgagggtgggcgccgcaggccactgagggtccacaaacccacctggaattgtgtgggatttgtgtgtgtccaattttatgtggttttccatcagattctcaaaggaccataaccaaaaattagtttagaatccttgcctaggcctattcttccctttatttatttacttggagacagggtcttgtttgttgcccaggctagagtacagtggcacaatcacggctcactgcagcctcgaccttccaggctcaattgatcctcccacctcagccacctgagtagctgggaccacagatacgcacttccacacccgttaatttttgtactatttcgtagaaatggggcttcaccatgttgcccaggctggtcttgaactcctgggctcaagcaatcttcccacctgggtctctcaaattgctgggattacaggcatgagccactgcacctcgcccttatctttttaaaaaaacactttaaaaatagctttatcgaggtataactgatagagcatgaattgcctatatttaaagtgttcaacttaataaaaaatgttgacatatgtatacattgtgaaacgatcaccacaatcaagacagtgaacatccttatcaccctcaaaagttgatctgctttctgtcactatagatgaatttgaatttttctagaatgttctattaatggatgcatacagtgtatactttcttgggtccaatttcttttattctgcctaattaatttggtggccatccacattactgtgtgtgtcagcagttcatggctctttatcactgagtggtgttccattgtgtggaaggaccacaatttgtatttccattcatctgctgatggacgtttgagttgttcccagtttttggctattacaaagaaagctgctatgagcattcatgcacacatgggcaaatgctttcatttttcttgggtggaaagaagttgttaaactgttttctgtaatggaatgtcatcttacattctctgcagcagcgtgtgtgagttccagttgctccatgtgctggccaacactcactaaagttagtctttttaagctatttttagccactctagtgggtgttcaatttgcattttcctaatgactaatggtattgagcatcttttcacatgcttatttgttatccacatatcttctttggtgaaatgtcagttcaaatattttgcccacttaaaaaattgggttcggccaggcgcagtggctcacaactgtaatcccagcactttggaaggctgaggcagatggatcacctgaggtcaggagttcaagaccagcctggccatcatgatgaaactctgtctctccaaaaatacaaaaattagctgggcatgatggctggtgcctgtaatcccagctacccgggaggctgaggcgggagaatcacttgaacccgggaggtggaggttgcagtgagctgagatcatacctttgcactccagtttgggcgacagagagagacttcatctcaaaaaaaaaaaaattaaaataaataaataaataattaaaaatggggttgtttgctgtttgattgagttgtaagaattctttatatatagtctagatataaggcctttgctggataaatttgttgcaaatatttttcccagtgtgtggtttgccatttcattttcataagcatatatttttgaagagcaaacttttaaaattttgaagcccaatgtatttatttttaatagtttgtgctttttgcattacatttataaaaccttttccaaatccaagtcactagggttcctcctatgttttcttctaattttgtaaatttagctcttacatttaggtctatgttcttttgagctaacttttatatatggtgcaagttatgaatctaagttatttatgaattcaagttcctatttatttatttatttttgcatgtgggtatctaattgtctaattgttccagcaccatttgttgaaaagattatcttttacgcattacccggcacctctgtcaaaaatcagttgatcacatacaagtgggtctacttttagactctattactttctcccaggtacagatctccttctctgtgggtggatgtttggccatagcctttactaagatggacctgtccgctggtgcttacctggtgattggactgtgtacctgggctgccttctgactctgtaagaatgacccctatctctcgttccagactaaatgtccactattgatctattgtctatcttcataccaataccctattgtcttgattactatagtttttaataagtcatacaatcacatagagtaagtctttcaatattgttctttttcaaagttgttttggctgttctacatcctttgtatttccatataactttagaatcagtttgtcaatgtctacaaaaaccctactgggattttaacggggattttattgatttaatggggattttattgattctatatatcaattcggtggaaatattgtcttataatattgtcttccaatccaagaacacagtatatctctcaatttatttagctttataatttcactcagcagtgctttgtagttctcagtgtaaggtcttacacatcttttgccagatttatccctaagtatttcatattttttcattctattgtaaatggtagtattttattttattttattttattttattttattttattttatttgagacagagttttgctcttgttgcccaggctggagcgcaatggtgccatctcgactcactagaacctccacctcccgggttcgaaagattctcctgcctcagcctcccaagtagctgggattacaggtgcccatcatcatgcctggctaattttttgtatttttaatagagactttgtttcaccatgttggccaggctgatcttgaactcctgacctcaggtgatccacccaccttggcctcccaaagtgctgggattacaggcatgagccaccaagcccagcctatggtagtattttaaatttcaatttctgattcttggttgctagtatattcgaaatacaattgatttttgtataatgatcttaaattctataatcttcctactcacttattaattctagtaccttttttgtaagttttatatgattttcttttttttttctttgagacaaagtttcattcttgttgcccaggctggtgtgcagtggggcagtctcagctcactgcaacctctgcctcctgcctcagcctcccaagtagctgggattacaggcacctataggattttctatgtagacatttatgttatctgcaaataaagacagtttacttcttcctttcaaatctggatgttttaaatttctttttcttgccttattacactggctgcaaccccagtgcaatgttaagtaggaatggcaaaagtggacatccttgccttgtttccagtaatgggtagcagggaagttttcaagcatttactcctccttggcttttattggccctggcaggggtgaccttttataactggttggaggaccccaatgtttgccccagggcattgcgctcttctttccagtgttttggtgcaagccctgttgagcgtgaaagtgccttggggacagggatggtatatttgactccagctctctacaccgtgcctggcatggcactcagcatgacaaattctcattgccaaccaggtcactaaatcaggccgaaagggcctgtttgtactgctgtccaccccatcccctttgctttcctcctggacaaaggcagccatgcttccctcctttccttctcttcccctccagaaacctgaatggaaggagacatgaaaggaaagcactcaggtttcaccagcatcaagttacttctatgcggtgtcctcattcgaaaataaacctgagggggtaagggaaggggaggtggtgacagagacaggagagagctgttatcacagctctgcttccaggctgtatttttaggctggcatttaggtttggcctggggacaaggggctggaaaatgcaaggcatttcctcttcctgtcagctgagacacggtgtgtgtgtgagtgtgtggacagggccctgccaccttcccacttagcgcctccagaatagcaaacaaaatacacttcctccgcaggcctgctgcgctcctcatcttgagactctatcaaggctcctccccaaactatgagcgctgttaacagcgctaggcagctcctcagccatgggagggacgagactctgaggtcctgggggggatattttagaaggtctcaatgacaacataacaggttcatttgtttacttgtttattcattactgctgtgtatcgtgcatgagctacgtaaccactctgtgcctcagtttccccatggagatgtcactaaaacttgcttcataagggcgctgagaggattcaatgagttaatactggatataaagtggtaacgtgcttaaaacagcacttggcaggtaggaagggctgaggaaaggtttgctgtcattatctgagtgcctactgcataccacccttgagcttgggtcccccgggggcaggggcttcggtggtgaatgagacaggtactgtctctgaccttttgtagtttactcagttggagacctggttgccgcctttgagcagtgtaagttttcaaccacaactttggaccagggtcctggaaacacatggagtgaaaggtcttctttaccactacaaggtgacaaactaatcagagacacgaaggtgttgatgttattagcactttgtggagctctggctggctttgtttcttttttgctctgtgaagttgtttcacatctccgggtctcatttttctcacttgtaaaatgagagggagaatacatacagtgggatattattcggccttgacaaggaaggaaactctggcacatgctacgacacggaggaacctggaggacatgatgccaaatgaagtaaaccagtcccagagagacaaatactgtatgatttcacttgtggatggtaaccagaatagtcaaattcagagagacagaaggtagactggtggtagctggggcctgggggaaggaggagaggggagtttttgtttagtggggatagagtttcagttttgcaaatgtaaagaattgtggagatagtggtgacggatgcacattatgagtgtgttcaataccactgaactgtatacctaaatagttaaattggtaaattttattatatgcattttactgtttttttttttttttttttttgagatggagtctcgatctgttgcccaggctggagtacagtggcatgatctcagctcactgcaacctctgcctcccaggttcaagcgattctcctggctcagcttcccaagtagctggaattacaggcgcatgccaccacacccagctaatttttgtatttttagtagagatggggtttcaccatgttggccaggctggtctcgatctcttgacctagtgatccgcccaccttggcctcccaaagtgctgggattacaggcgtgagccatcatgcccagcttattgtaattttttaatttggaaaaaaatgaggagagcagttaaagtagatggttacctaggtctgttccaatccttccttctacaaaccaaaatatctctttctttcctttcctgttgtctttctctttcacacacagttatcagggctgcctgctccagagcacaggttgtgcactgcacaactccagggagtgcccttcttcaagactgcagcgtgggtggcacaacttgttcaactgcataatccagtctgtttctgatctacctgatcagaaggtagtctcttgtgtccatctcctgagtttatgcaaagtagaaaaaaaattcagcatcaactagaaatagcaaacagaacacatttatctgatcttccccctttgtatcatccattacatttagaagattgttttatggttggtttcttttgcctgagacttagcaagtgcttgttgacattcccagtcattcattttgcaaatatttcccaagcactcacagtgtgctgggcacggtggaggtgctggacacagctaagcatggagtccctcgtctcatggcacatgcattatagttccaggaggcagaccagaaacacgcaaacaaataggaagccaacgtacaagagtgttaagtgccatgtagacaatgactgatggtcctgggcaggatggcgtgaggggttgctttagactgtgataaaggaaggcttcctgggggaggtgatatttgaattgtcacctgaatgacaagaaggagccagccaagtgtatgtgggggcaaagtcctctcgggtctcctcacatcgggcctggcagggaaggggtgaagccacctcgtgctcttggcctctcttcctcactccttgccctgtcttctccactttcctccacctgaggaaaaatccccagaggccttccattcagataacggagaagcctttgcaagagggggctcagaaatctccacccagactggagcctctcctccatccttccccttcctacagatcccagcagagagaaaggagtcgttcaggtctctctcctgagtagatgtttggggtggatctcctctgtcaagccaaatgttacagggatttgtgaaggccacccaggagaggggaagcccagcttactcaaaggctgccctgactgggatggtgggataaccaggatcactagatcaggctgacaaagaacaaaattgcctccactgtccacaagaatggtggtgggagcaccctgttggagcaggtggccatgagttcgaaccctgtctcagcttcttactggctgggtgactttgaggaggcaacttcacctctgtctcagtttcctcatttgtaataggggtgctgtgaggactaggagagtttacccacacagtgctcagggcagcatttggtgcacaaaacacgtgtgtttgctccgacgtcattttccaggagggtttctgtccactgcagagttgtcttccattcgtcagcaatctcttttccacctctacaaacacagccttggctcattcacagaagtcttgatctggaagagacagagctatagacaggtcaggggagtgcctgatgggagtttctggtatgtgggagaatggggcagcctatgcgggacagtgttttcctgactgtgtggaccagtgttttgagcttgaatatgtaggtatctacatttgcttctctaatcaagagagagttccttactgcattctactagcaaagcccatccatccatccatccatccatccatccatccatccatccatccatccctccatccatccatccaatccatccatccatccaatccatccatccaacaaatattccctagcacttatttttgctaggtattgtgctggctttgcaaaggtaagtactttatcctaggttcccctggaaacacagcctgtggtcaaatttatgtgctaatgttttattgtggggtgcaacccccagcagcaagagtgaggagggagaaaaataaggcagaggggaaggaaagcaaaacccagctgtgcccttggcatgatttgagggcttcggggcagccatggcttctgaaaggaaagttttgagttcagcatgtcttctgtggggctttctttgcttctttttaaaagctttattaaataatgataaaatatacatagactaaaacttaccattttaataatttttaggtatacagtttagtgacattaaacacaatgacattgttgtgtagccatcgctaccatctatctccagaacttttccaacttgtaaaaccgaaaccctctacccattaaacatgaacactcccattcctccttcccctccagcccctggtaaccaccattctgctttctatctctgtgaatttggctcctctagttacctcacgtaaatggaatcatacagtattttttctatttgtgactggcttatttcacttagcgtaatgtcctccaggttcatccgtgttttagcatgtgtcagaatttccttgctttttaaggctggataggattccattgtatggatagcccacattttgtttatccatttatgtttgatgggtggttgggttccttccaccttttggctgctgtgagtaatgctgctatgaacatgggtgtacacagatctgtttgagtccctgcttccaattcttttacttctatagatccagaagtagcatggctggaccatatggtaattcgacgtttaatttttttaaggaacctccatcctgttttccaaagtggctgtgccattttacattccatagggctttctttcttttttagacacagggtctcactctgtcacccaggctgaagtgcagtggtgtgatactacctcactgcagccttgaactcctgggctcaagcaatcttcctgccttggcctcctgatactacagttatgtaccatcacccccagctctgtggggctttctcttaaggagcaggtgtgttgtgaatgtcagatgtcccccaaatgaagcaccaggtgcccctagtttccttccttcatcctcacagtagcttagggttgtcataatgctcttgctacccattgtcacactgactttgaggtggtgtcattataccccctttacagaaaacgacactgagccccagagtctaagacgggcagctgctggtctgtctgtccagcctccattctccctccccctggttacagcttctcaattttccattggggagccactcctctactcgcaatgtacgctgaggcactgggggctgcccacactccttggctccaggggcaaaccagatatttcattttccttggacatggtgcttggtttagtaggagtttcatgacccaaacctgaccaaccagagcctatgagcaccttttggaaatttgccaagagtttggggaagtggagttagctttcaactgggattgctaagcaaatagaatgtgaaccttcagctgctggtagccacttctaccaccccttaggataactgaaactgagcaagaagccaacctagagacatgaaaccaagaggtgaaaagatagactccaaacaatgtcacctgagcacctggatttacctgtgaagctactagatatgctcttggacttttcaattacagaagccagtagatctccttcttagcttaagcaactgagttgaagttctctctcttgcaggattttttttttttttttttggacagagtctcactctattgcccaggctggagtgccatggtgcaatcttggctcactgcaaacttagctcactgcaacctccatctcccaggctcaagcgattttccttcctcagcctcccaaatagctgggattacaggaacccaccaccacacctggctgatttttgtatttttagtagagacggggtttcaccatgttggccaggctggtcctgaactcctgacctcaggcgatccacccacctcaacctcccaaagtgctgggattacaggtgtgagccaccgcgcctggcctcttgcaggattcttgaagggaatcctgactagttcggggagtttaagaaactcgctcaagatcagccaggaaatggtgatgccaaaaactcaaacccctaacggagttcccaacttagatccggatcccggctcaggatcaagactagccgttgttggactgtcctccagaactctaggattagcatcccgagacgggagctagatcttggctgaagcactgtaggaatcagcgtagtcacaaagcacagaactcatgagctgaacctaggcaggaattggcatgttaccacccaagggccaaatccagcccacctcttgttttcgtacagtccacaagctaagaattctttttacatttttagatgattggaaaaaaatcaaaagaagaatattctgtggcatatgaaaattatatgaaattcaagtttcagtgtccataaatactgtttcattggaatgcattcatattcattcatttgcatgttgtctattgctgcttcgtgcttcaagagaagagttgcgtagtcatcgaagagaccgcctaacattttagtacctggcctatataggaaaagtttacccattgctgccaagctctgagcttccctccttagctttcttgtggcttttttcccaagctactcatctcgtcccttcctgcttccccttcctccagtcctggttcttaaagaggcaggacctctgtgaaatcagtgaatgcttgggaagctcccagcacagagcctggggcactgttagtgctcagtcactgaaaggtgttgggaaggaacctgagtcagcagtgcagcatatacgtgcagcctctgcatcctgtctctgctgctcactccctgtgtgaccttgggctagttgcttcctgtgaaataggaataagaatagtccctacctcatagggccctggtgaagatcaaattagtcattgcatgtaaagtgcttccaagagtgctgggcacacagaaaacgtttgataagatcctaattgtcattgtttttctcattggcttaatctccatggaggatcttgggagctgcctaccattgaacctggcccatgtttggcccagggcccccgagaaaggtcaaggctgtgcagggagcagagagctggcctcctgactcagagccttggcaggctggggcttcatgacacccctagcaggaggcagcctggggctgagatgggggcttaaaagcaggagatcctgggcttggccctcccagcaaagggatgtgtgtgtgtatctgtagctggatgagacactctttctaggaaaaaaaagggcaaacaggtccacccaaaatggctaaaggcagccccatctggggtgggcagtttccatggctgagaagaccacagagccactggggctgccttggcctccacctcgggcgcaggagccagctgagcccccattacactttgctctgcccacccctgtcctggcagctcctcttctggcgaaccagggcccaggacaagcagcccagagaggccggagccctgagccggtacagcaggctccggtgggggaagtgggcagaagagtgatggagccggatgatcagggaagagcttccaattctcagctccaggctgtcccctcttgtcccagttcaccgggtctcttaggctccaagcctgggctgagtggaaataggcagaattgaagggtcctggggcttctgcccaggctcaaggccacccaaatgttctggaagtcctgtgggaggggcacctccgtggatctgctgcctcctgtcaggcctcagctttgtcaagacctcagtgaggggtgagctgagtggctgggcctggctgtcgccctgtccctcacttggcccagcccgggcccccttcccagccactcactgcagtatgttcccagccggagcctggttctgcagctcccaggcaggtatgagcatccactccttcaccaggagggcaggacaggcaagagggacttcctgggccatttcagcaactgtcgctttttaggagacacactcctagacagaggcactcatactccccacccatgcagagaagcacacgccccttagctgccacacacccaaggccactcggacacacgtgcctccctttgcatgcacacgtcctgctgataccacctaacctaactgtgtctgaagctctcggctcactcctgggtttgtctgaaggccagagcaggctgacgttagccttccggagtgactgtgagaagcagggccaggggacatcacacagaggccaccagaaggtcagcaggttcttacacatcatctgggccagtggctcccacaccttgaggcatgccttaggggcctttgtgaaaaattatcatgtcccaccccagacttggtaaatcagaatctctgtgatgatggcaactgaggtgggggactgagatctagcagactctctagcggttctgacgctggatagactttgtaacctgatctagtccaacccccttactgttccaattcagtaactgaggctgagagagggagagtggcctgtccaaggtcacacagcagttgcctaggccagccaggactaggacccaggactcctcactgcccaaccccaggcttcaggtctgcagagatccccatgtccttccctgtccccaccagccttgagtgtccccctggcctgcctcccagtaaggtcagctggctttcatgttctgcagtgcccagcaggaccagggccagggctagcctgcagccagcagtcctctggaacagaggctgggtgactgtcttcagctcccttcccacgcagagggcccctgctcgggaggcctgctttagggaaggtgaaggctgggctccctgcagtcacagatgtttgccccaacatgctgagcgcccccaccctactcctgggggaggccggaaaggcaagtcctcacgctgcccaaacatctggactgtgcagagagagccaagatgcgctatgcagatgttttcaaagctgatgccgggtgtcagcagagaatagacatctgggtggatggccggggctcatgctaaagggcagggtagattgcggccagtgattcagggcggtgttggcacaaagctgggggtgggagtgtggcctggggacttcactcccccagctggttggcctccttaagtgggagtcagatccccagggcggcagccaggtaacgttcacacgatagctaccacttgttgagcactcaccacatgccaggtgctgttctgcattttgcatgtattatctcatttaaccctgacaacaaccctgtggggcaggtaccattaccgtcccccttctccaggccactgaagcacagggaggtgatgtcatggcccagtctcacccagcaagccggtggcagtgccaggctcacacagaagcccatgcaggtcacctctgaacagccccgctccatcccatgagtgacccccagtggtttttgggaccaaccccaccatgcccttctttcaaatattacatttgcatatgggggcattttgcatagagaaaatgggtttctgggcagcgtcccttttcctgtgtttggaacttggggaaaggatccactaggaaggcaagccaggccctcctcccgggccggtgggcagctgctgccaagtctcccagggcttctgagaccagaggctgcttcctgaaggaaaagtgagctccctgtggctgaggccagctgtggccagcagggctatttatttttctgttcctaagcctttaagtcatctgtttacataggcagtagaaggagttgggcttggtgtccctgcctggtgccctccctccctccctccatcctgggccttgcaggctgagccagggacccccagagccagtggtggtagtgatggtggagggggtgtggtggggaagctctggggcctggaactacagggccactgggagactctgcactcagggctctggctgtgatgatgaccaggcctagccactgcctcccctgcttcccaccctttctccccagatcctgtggaagtcctcagagcctggagcctcactttccgtgccccctcacccatagcaggtatccaggctctgagctctccccttccttcagcccagctggctctccagagcagccagacatcagccacccagcccgtgagaacactcaccagccagcccccaccctgccaggaatgggagtggggaaccttccccagctctgagcccccagaggagcaggccctggcccgccccctccacaggcatgttttgaggcctagagcagccatgctctggggcagggccgcagacacaggggaagaagacgaggtttccttcctgagaggagcaggggagagggacgcacacgcgtaaccccaggacccctcacacaggtgtcttgatagaaatgcctggaggccctgagggaggtggtttctctgagcgggtgacattgagtgactctacaagggtgggtgacttctccgttggagaaagggagcttcagtgcatgcaggaagaaggaggctcccaaacccatggtgcagctgagggagagacggcagagcacgcaggaggccacccaggtgtgtggccagagaggtgggtggggccagcgcacctggggcctgaatgtccccagacagaggccatcaggaaccgcggagcgcttgggacaagggagtgacagcattgcaatgctagttaagaaggaaatccacaggagtgaggggaggggcagggaagtcccccaggaggactgagagtgagacaaggtgagacaggccggggcggacaggagagcagactgcagagatgttctctccctccagaggggacttagggaagggatgtggatggagagagaaccagggccctcctctctctggaccccacctgtgcccgtctgctcattcaggccatgggcatggttctgccacttgaggcatcagagtccaagcctggctcagctgcgcggcgatgaccttctcattctggtcagcaactatcaactaaacacctgctctgtgccaggcctggggttggcagggagagggcggcagaggggagggatagagggcctgttggggcgggggggaataaggagctgaatgaaatcgtgtccccacccacagaaaggcaggactagggcagccagccttggcctgaggcagccgtgccagggtgactggggacagaggaactcggggtctggccctgagcaatgtgctggatttacaagtagagacaaggtggtggcattccagggaggaacaggctgaacaaaggcccagaggtagagttcacagtgtgacaggcacagacagatgccacagccccgctccttcccgatgccggccctgggcctcaaggtcatcttctggcctggggtggtggtcatggaggatccaggatatctagattcaagtgctctccctgccgtctgggctgcctccttcccatggacccaggacctgccctcccagactgtcttccttcttgctcttgtttgtcccatcctcctcatccctcccatctcacgttggggctgggagctcattccaggctttgcctctccacaatactttttccctcggggacacctgagggatgagcaggacttagctaggagaagaagaacagagcattttggcaggaggaacagcatggtcaaagccccgaggtgggcaagagcttggtgagttggaggaactgaaaggcagtgtggctggggtgtagttggagacagagacagatctccaggctctgccatgattcatttccagagcattcagcctctccaccaggaaaatgtcaagaaaaagcagctctgtttccagagagggaaactgaggcacagaatgtggttgagggaaggtgtctcccctcatgcctggggctcatctctccttctgggcactgtgttttctggagaagaggactctcaactgaggcccagagagaatctaatgcctgatgatctgaggtagaacagtttcatccggaaaccatcaccccccaaccccccaccccgtctatggaaaaattgtcttacatgaaactgatccctggtgccaaaaggttggggaccactgctctagagcacactgggtagcaggggtgtgaccttttctggaaggaaagatccaggatcccctgggtgccctgccctggggactgtggtctggcttccagggatatcagctgtccttttaagggaccaggtcaccagtcaggcctattggccttctcaggaaggctgagggctgtggaacattcccgctctgtgaggtcctgcagggcagctcattgcagaggacacggagcagcccccagcttgctggccaatccccctcttcctagaaccccctgagaagcagagagggaggacagcccttgggacgcccaggagcaggagagagagctacagggaggggccaacagcaaactttgaaccccaccctctgttgggaactgcccagtagggactccagacatttggcttccagggctagatttagttctgactcactggctgactttagacagctcacataatctctctgtgcccgggtttcttctcaggaaaattgcaagaaaaagtcatgtttttctcttccttcatcttcccagtcaaagggaaggtgaaataaatgatgggcgttcctgttgtctctttgttattatgcaaacaattgggtgctacaaagggtgcaggacagacagataaatccaaagctctcggatctgcctttgagaccaaatacaaacacgactgcatgagtgcatgcagcatgcacactcacacacacacacacagaggcaggcaccaacacatgcacacacactcacacacagaagcatgcaccaacatacacacacatatgtacacacagaggcgtgtgtgaacatgcacacacacacagaggcatgcaccaatacacgcaagcacacacagaggcatacaccaacgcatgcacacacacgcaggcatgcatgaacatgtacacacacacaggcatgcacgaacacacgcacacacacagtctgcttttccttccactccaattttgccaattcagttagactttgaaactgagacccaagaagaggctccaggttaggagttcctggtgctaagtcacagaactgggtacatctgtgcagaggcagtgtatgactgttgcatcagccatgaaggtggctgagtttgtggttgtaatggagataaaagttgtggctttgcggttccggtaatcatctcaatttcactttttttagacactactaatatcttcttccaacccactcctcctaaccagagaagcccatccataagtttagagccaaggtcaaggaggcctggagaggtgaattcacttgtccgtggttccacagttggttttagggaggggacaacgcatcgagggcccttcccctacttggctgccccgtgacacacacacacctctgttgagaagccctggaggtggctcattatgacccaggctgtgtctgagaccaagctaggaacagaaaagaggccaagaccaggagcaggaagtggctggaagcagagtgggacttgagagtgagcaactggcccctaactgggtgactatgaacttgacagttcctggtgggggtggggggcgagccagcagagcagctgtggcctgagagctggccttagcccagacctggccctgggaggcagactggcatgccccgggcttcctctccagcagccagccccttccacagagggcactcttgaccggacagctgatgaccaggcctttgcagggagagagagcccagtgattaggccattcaactgccatctcatctccctctgcagacaatccacagtggcctgtggtcccacacctgttccctggaatgcctgcaggggcctgggcagggccttctcccttcctcagcctctcctaaggtaggaagagtcccctccactaagcaccgtcattctcttcctgtctccccgccacattgccccttgatttgaagtagatattgggaatggaggcactgttcctgatgcagacgagggcctgaggaaatacttgctgcctaaaatacctaaattcattcgtgcacttctattgctttcaaggatctgcagtggcaggacttgataacagcaaagctgcccatggctgtccctgggactcccctttaaaacaatgatctgtcactctggagacaaacacaggtaagtggctgggtgatgagaagtggttggccagtctgtctccataatattaacaatgtcatcacaacaataactcattcatacaccacttaccctttgcaaaacactcttcttagcacctctcacatattaatacatttaatcctcgtaaccctataaggtaggtattatcatattaattcccatttgatggatgaggaaaacaaggcacagagatgttacgagctttgcctgaggtcacacagccaggggtttggataccaggaggctggctccatagcccttgcttttaagcacttatgcagaccgtctctggactcagatggttcaacagctgcattgtgatcctgttgaatccttatttggcttcacatactcttcctggatggtacaaaagcccatgccaagctgggcaccgtgggtcacacctgtaatcccagcactttgggaggccaaggagggaggatcacttgagcccagtccaggagttcaagaccagcctagctaacatagcgagaccctgtcttctacaaaaaaatataaaaacttagttgggcatggtgctgtgtgcccatattcctagctactagggaggcagaggcaggaagattgctagaggcaggaagattgcacctaggagttccaggctgcagtcaactatgatagtgccactgccctgcagctgggtgacagagcaaggccctgtcttaaacataaaaaaaaaaaattttttttaaagcccatgccagcatcaattcacatcagagctcttttgtaaaggatctacacagtggctccttttaggcttttgctgtcttcccctgctgcgcccctgctccccagccctccctctcccaggccccagccctgcatcccccactggagccatggcacccacagccagcctagctctgtggggctcacaattatgccctccctgtggaaagccacccgctgattcctccccctactctgagtcttccccctgctctgcatcctccccaaacagctgagcctgtgcgatgtgagaagggaaaggacttgccagaggtttccagaaagcctccagaggtcactctggcctggctcaagtaggttgggccctgaccaccgctttgaatagctactgtcctgccctgggtccactccctcagcacagagcaggctaattggtgggtgggaagcagtggaggcctggaggctggtctgtcccgaaggaggcaacggaggagccaggcatttgacacagcagctgccaggtatccagtgccaaagagaagatggagtggagcatggagactctctggcccgaccctgccactcaacagctggtcaccagccacacccccaacctgccagcctcccatccctcccatcccaccaccaactcacccagccaatacccagcctacccagcactcagcgtgctccccaacccccagcctgacccagtacacttaccccactccactacaacctcctggcctaccccacataaacacccttcctggcgatctctagtctgcacccacaccccagtcagcaggcctactcctatctagcccccagcctacccacccactcgctggtgagcccactcggtacccagggacctccccaccatgaattcagcccctaactgccccgggtccctgactactcacctgcgacatcagccaagtgccagcccgcccaccctgtgcccagcctgcccacatccccacttcataaaccagagccgctttttccagatccgactccatccaagctccaagaaaggcaggcttgccagctcttccaggactatccaagaattattttagaggcttcagacttggatggagatattttatcctcgggtcaggggagagcagagcagacggggtgggggcacttgagagagtgtgcctctgtgcccctggtggctccagacctgcccctctgggagaagacgaggtagcttcctgtacctcctaaccccttctaccgcaaaactgttggaaagacagtaagtttccaaaactaggagccaggctgaaggggtccccagcagatgaagttccagaggccctagcgagataggcagcacttccagcactgaacatgccagagaaaggaaggcagaagggagcgatagaagggtgcagggcaagatcaggaggcctggaggcctctcctgggccccgctcatgggtgagcctgggccctgggctgtgaaagtccaggtttctgggtttagacactcactgtgtggttttgggcaagtcaccaggcctctctgaggctcttgaatacaagagtgttgactgagaggatctctaaccttcccaggcacaaccctgctgctggccctggactggggagtccttgccaggagcttggccaggcttctggtcctctctgccttgggcattctggttacaaccacggggttcctgcttcacccactgaccaagccctgcctgtacctggttcctgcatgatcctctgtggctgagcaggaagggaggcctccccacgaatttccagagatgaggacgcaatcagcaacatcaccacggccagattctctagcccagggagggcaaataggctttatttcatgtgtctgcacccactgactgccagtagctgcctggggcacagttctgagaagaatcctaggctcagtgagaaagtgccaaggtcatctagtgatgtctgcataggcacctgaatagcgaaaggggcgtgaatgccaggaacttgggagtcctgaggaagggccaggctagcctctgggtttctttcctagtgttatccccaagcctacagttcagtcttatttgaacgtgtcttctctcagttgtgctatggaaattaaaggagaacagtgagtgtactcctagatcagatgccagttaggagatagcgcgatcttcccaaaaagatgcaaagatactgtggagtgtggccctttgtggaccctttttgtgtttttacactttaaaaaaattatagggtgttttttttttggtgaaaatgaaagctccacgagggcagtcttgttgttttcaactgaatgaattgcttgccatggagaaggttgtgtgttactcatccttcatttgctcctcccttcctgcctcattcactcactccaaaatcattcacccattcattcattcattcactcattcgctctttcatgcagcaaacattcacaggggccccatctcacccccactgccaggggagtctctgttcacccttctcaacgaggccagggaggatctcatgctaggaaagtctggagacatgatgaaaggagccatctctgtagggccaaggcccatcagggactcactgcatggatgtggacttttcgtttcctcacctgcacgtggccagtggacagcatgagaaggaaaagggaggcaatgccaaagcaaagggcaagcaggacacttcctggccttgataacatgagtgccgcttcccacccagaaccaaactgggggcagaggaatcaggctgaggcttcaaggaaacctggccagcatccaggggctgcaactgagctggtcccagctcaagtctccagatgaagaatgcatcctgaggacttggcctggcaggacacctctcgcattgttacagtggggtccatttatgtgtgagtgagcacatgcaggtgcctatgaggaatttgtgtgtttacatgtgtgtgcatgtgtgcgcttgtctgaatgcatatacacactgcacagtattccccagcagcatgggcaggcggggtgtgggggtttccggctggcagacccttccttaaaaggaagcgtctgccctgcccttcccactcctcccccacatcacagtctcctcctacagcctgcagtccacctccatttttggaggcccctttagtacagtagcaaggactgaaacttcctgggtttgagtgactggccatgtggcctcaagcaagtgagtttcctcataggcaaaacgggggtcttgggttattctggggacaaggaagcacagtgcatgtaaagcacaccactcagcgcctgccccgttcttcctgccctggcgatatgctaaacaacagggtctccactaggccagatggggaggggaaggggaggagaagagacccatttcccaaaaatattgacttcgaccttgaacccaagcagctggtcagagctggtggcctctttctgggattgtttatgtagctttccttgtaaacacaaagaatggaaaacaaaccctaaaatatttaaaaataaataaatgaataaggaatcgtttgtgggtggcatagacaggacctagggcagatgggggcagccatcaatgcattaccctgggattaaatgcttgagtaccctggagccccagcccaagactcttcccccacctcctccccttctggttacacatccctgttgttcccaccttctgggagaggcctgaatcctgcagcactgtcatctggccacttctgtgaagagagcaaagggcctctgccgggaatcagcccagctctgtccacctctgtgtgaccttgggcgagtcactttccctctgtgggcctcagtttccaaggatctctaaggcccctttaagcaagcattgacatcctgtgattccctttgagctcagagtgtggttatgacagcactttgactagagtaaagaatcctatcaagagatgctcattagcacgatattgggggatggaaatagctctacccttggctgctgggaaggattcttattagaaatccttgaactttctgttttgggattgtttgggccagatctgggcctggatgcaacctgagatatttgttggtgattggtgatctgtgcaaggagaggatctggctccttcctgcctaggggccagtggtgcccccagaactgtctctcccctagccatgcacccacctccaccgccacacgcacacccaggagaatgacattaccttctctagtccttctgaatgctgagctcaggggctggggaggccactctgaggtctcttgtctcactctggcccagagcagagccgacatggaatcccagtacccacccctgaaaggggatggcatcatgaccctctctcccagccagattctttcatagcctgggccacctgcaactttggttttcaaaggcatgtttcaaatgaatgatggaggctttgagtcattgctctgagatggaagtacaggggtggggagagtatgggctttgacaagacagcagagggtgggtagttaggagacctggattcaccatgtgtccttggataggttgcactcctcacttctaggtctcagcattctcactgttctttgttcttttatatataatgcatagttactgagcaactactttgtaccaggtgccatgccaggcatcgtgggtacattagtgaacaagactcaacctatgcctttgaggaggtacagggataagcactccattgcacctgtattatccctccccactcctgctgccattgcagacatcactaatcaaccacagcatgctttaacactgagcccagacatgacctcaggatctctttgaacccagcactccagtgtttccaacaactaccaagtggggactagcccccattatgccttcctcacagggttgcacagagaataaaaacaagattgtaattgggtgagggaaacatgctctaaaatcaggtccaagtgcagagtttttccctaagcctataagcatggagagcagctgatagggcaggagggtgcttccttcttcaaatatccttgagaattaagccaaagggccaggagcagtttatgtgcaaagactatgtctgtccccagtgcccaacacacagcctggcacccactgcctattcttaaatccttgttagataaatgaatgcatcttcatatccctgcccagctgggcagtcacctaccagggcaggcggccatgtctgcttgctcctttctggaataagtcagcccagcctacaaacagacaactcttcagaaggcagatccaaggcccctggtgcagataactgcagtcaaatacaccccacccgcaccccaggcctcgttcaagcatctttccttccttcttggccttaacaaggtggagcatgtctgtttggcaccttctcccttctcactcacttgctagataaccagggattcaggctgactgtggaaacctctggggtgtctgggacctgaggctgctcccacaatgtgacaacacctgtgcattaatggagggaaaggaggctggggagggaggctgctcgccagcctccactggctaggctccactggcctgcttctttccaaggcagacagatgaggacagaggaggtggcttcccccgaggggaaatggagtatgggcttggtggggcctctgctctatgtgtttatgaactagaatctcacataggaatctagctctgcagactttaaagccctctcccatcctgtagctgatgtgaagcatataaggccctatgagaaaggccatgaaagactgttactgctgctctgcctatgtggaagctggcccagagaggttaagtgactcatcttgggtcacacagcctttcaagaccagctgcacattcatcatgtctgccatctgaatagaaacctggagatggcatgggcctgaagtctacagaaggctgccctgtaggagtaatagggcactctgcacaagtgtctaggctctggcgtcagggctgcccagacccaaatcttgtccctaccaccctcaagttgtaggagcttagacacatggcttaatccacgagactcactctcccccttcagaaactggggaaaatattacccacttcacgaaggttttggaaaattatgtatttctttctctttctttctataaacatgtattgagatttattgtgccaatggggtacaaacatgagcatgtcaccacctctgcccttgagcttaaagtctacatatagatcagcaaatagtaaaatacaatgtggctggggctgtgattccacacacagatctggagaactgaggaaagagagactaactggggttgggcacgctttggtacaaggatgaccactccatcgtcctgtattatccctccccactcctgccaccatggcagacatcactaatcagccacagtacactttaacactaagcccagccataaccttaggatctcaaggggactgaggtactgaagggtgagtaggagcttgccaggtagacacagtaggttggaaggatatttggggaagaggaaacagccttaaaaagacatggagatgtggagaaagatggcatgtcttgacaatgggggaaggtttggtgtggctggtatatgagcttcaccacagagatgaggctgaagacgttgtcaggctgcagcgtgaggggatttgaagccagccaggcccaacagcagagggcgacagtgggaggatttcctgcaggagagggctgggaggcttccaacctggccctcttctgaggctgagagtcaggccaggagctactgtagagactccagcatccttgggacatcaagaaagggagggggtcagaggaaggactaagaactaaggtctgatccaggagcagacaccaggccgctgatggccctaggtgtcaggctaacctagaaaactcccactgcacagaagcagcatggtgggctcaggagtagcagttcaccctgcaggctcttgttccaaggcttccatttccagatatttggccgccaagggagggtggcccctcctgggtggtgaagaccagaaacctcactttccagaggggaaggctagagattgagaaaggtcagtgagcccaccaagggcacatagcagagctgaggccgagggcagatggcatggagggtttccagagctgtgaatgctggagccttggccctaatcttgtcagaggggactgagaacagagccaaggaggaaaagccattgagggggcctaatgggcagcaacgggtggcagcacccaaagcagaaggtattggctacccgcaagacaagttttggggcttttatttgcaaagcccaggctcttaatgggtcattgtgctgattgtcttgtggggtgggaagcgtggtgggactcgggggagaacagagcaaaaggtgggagcacttgttgaggaacatatttggagaggcccccctccttcatccccaggctgggaagagaagggtgtttgtggaacctgagactgtggagaccaaagcccactgtcatgcagggcctctgagagacccctaaaatctctcaggggccctgcctgagattgggctttcttcctcttcctggggaggcaggaagagtgcacattaggaaccactgccccgagagctgccaccagagactcctggaaacgaatgaagcagccaccttcaatgggtcatgggagttggataatgaggacactttccagatccttgtgatcctagagagacaggagcccctcaaaacatgagctttgatgccttttcctccttccctggggaatccaaggtcatctctggaaatactgactcttttaatgcccgtctttgtgcgtttgagctgttataacaaaataccacagactgggtaatttataaatgacagaaatgtatggcttacagttgtggaggctggaagtctgagatcaagctacgagtagattcagtgtctggtgaggggtgtgctctctgcttccaagatggggcgggggtgcgacgcaggggcagaagtgagcaggcatggggtctgcatgcccacatcagtgccttatctaccaggcagtcaagctggtgtcttcatgggtgcaagtaagttgtaaaagtggctcaaaacttcagcgggcatactttgggttgtaactcaactgttatctcttgaggcaacctcctggtgggtgagagttgggctctggagcttctaagcacatagttagatgaacttgccctgtaaggaatgtctggtgaagaggaggtaaaaggctgtcattgcatttctaaaggacagagtaagaagtgggagaaaggaggaaagaaaaaagaagagagaggaaaaaataattaaactatctcttagaaaaatgggggtacttgattacgttataactgaacaccggggaggcagcagaacatcaaagaaagagaatgaaacttgatgtttgatgacctggctgtgagtctttgctctgctatttatgtgctccatgtcctgggacacacctagagtaagcagggatcactgctgcagggctaggattggaagccaagtaacatgctgagaaaagagcctcgaaactcatacagaaaaaggaccagatccacaatcgatatggaatcataagtcaataaaggacaaatgacacaataaaaaagcaggcaaatgctctgagcagataacatgaagaaacacaaatgatcaacacatacacagaagcaagctctccctcattagtaaccagggaaatttaaatgcaatagtaattttcatcagatcggcaaaagagcaaacttaattgtggtcaaagaaaagtagacaagggtgtggggtagggacccacacacctgtgagcggaagtataaattggtacagtcacttcctatggcaactttgctgtaatctattaaacctgaaaatgggcatagcccatgacccagcaatcacacttctcggaacctattctaggtacctaccctgaagaaacactagcacgtgtatggggttttcattacaatattgatggtaaaataaaaatggaaagcgaaatattcccaggaggaaatagctagctgaaatgtgacctattccacaatggaacacgattcactagttaaaagatgatccttttgtacctacatagatagatctcaaaatcactgttgagtgggaaaaaaatacagtcattcccctcttctctgtggtttcactttctgcagtttcaactactcatggtcaattacagtgtgaaaataggtgagtacagtaccataagatattttgaggaagagagagagaatacattcacataacttttactgtagtatgctgtcataattgttctattttattactaattttgttgttagcaatctctcactgtatctaatttatacattaagctttatcataggtatgtgttataggaaaaaaacatagtatatctaggatttgacatggtttcaggcatccactgggggtcttggagaggatccccctggctaaggggtgactactgtataagtagatgtaatataatcccaagtcaggattcctttgtactttaagtaactaaacagccaacctactatagcataaacgaagaggcatttatttttctcaaataacatggagtccagaagtagcaatggctaaatttgggtcagcggctctctcatatatctgtgattctctggcttttctcttgtgctcattgctacatagtcgtgaaatggctactgcaacttcagacatcacatttgtatccaatgcggaagaagggtaaagtgaaagggttttctctcttttttttttttttgaggtggagtctcgctctgttgcccaggctggagtgcagtggcatgatctcagctcactgcaacctccgcctcccaggttcaagtgattctcctgcctcagcctcccaagtagctgggactacaggcgcccgccaccacacccagctaattttttgtatttttagtagagacggagtttcaccatgttagccaagatggtctccatctcctgacctcgtgatccagctgccttggcctcccaaagtgttgggattacaggcgtgagccaccacgcccggcccagggttttctctttacaaagctttaggtcttgggtgagggaagcccttcccagagaattctccttacatctcattagcaagaactgggtcatcagccaacctttggaccattctgttaaaggggggagattatcaaaattcatttacatcagtcgtgattcattctctagaaattagaagagggacctacccttccctatagcaagagagttctgcccactacttgaatatcagtttctgttagcatggaagaaaagggtgccctggctgttgggtgggtaagggatagtgtctgccacagatacaatttatgtggaaaagaaaacacacccatgtgtacaacattacctattttttttatcaagtacatacaaaggttatcacagaaggaggcggtggcagtgaagaggtgggagtggggaaagggcttgcgtgtggtgctcaaagggcctttggttttatcagcgattctttcatttttaaaagggaggctgtattcatgtatcacttgggtaactaaaagtcagtttctaaaagttctgtcagtgactggctttggcatccccagatttggcccaatcccaacagagcccaacactgcagaagcaaagacttggtactccaaaaagttcaactgggtaggggagcctggagaggaaggaggaaattgcctgaatgactcttggctctacgaaaaaagttgggagccaatcatgcaaggctgagcagtcctttcgggactgtctttgacagacagaaagtcagcccgccagtatttccttgcaaattctcaggcctccttctgggattttcccttgttcttcaaacagaaactgcagtctctgattaaaccacctgtcaactacccacaaatgcagctggtgtccttaaaactgcttacaaggcactcaggggtgcaaggggtggccaggggtgcaaggggtggccgggattgatggggcactggctgcacaggctcagcagagccatgaaagagctccctggggcacttggagtcactggggccacctggatgtggggagatccatgccagacaaagcacagtgcagtccgctcattgccacaatccagccttgtgcttcctattaccccatcttacaggtcaggaaacagaggttcagggaaggggattgcccaagtgcacacagcatggaggctctcagagtagctgccagcccatagggcagcgcttcctgggaaagctggaaagggaaatgagagaaccagagggtagtggagttcttggggatcagcccctccaaagcccacttctgtcgcttcctccttatgaccacagcacctaactgctatcccaagcccaaggtcctgccggaaagatttaacatctaagaaggtccttggaaatcaatgaatctggtgtggatttccaggaatggatggatagaaaccagctttaaaaaatgaaattaataaactagaaaatatcagaatgtactgcatatagtcaaggtccatatcattttgtgaaatttgtgtatctatgtttgtacccagtcagtggcgaaggtgtttctcactgtgaattgcagcacgccccatcccaccaaaaaaaggaaagacactgatttggtctgtgtgcttcatttcacagatgggaagactgaggcctaggcatgcgtatggcttgcacagggccatgcaatcctctggggacagagccccaggcacctgaggcccgaagtggcttcaagctgcttccctggttattgggctccaggcctcacacatgccctgaagggtgcaggggttacagaagctcttcctgccccgtttccacgtgggagctgcttatttacccagccctgctcctgggtccccagttaggtgagtcctgttcatttgcagctcctgctaaacactcttgctatggtgaacacttggctgaagttcctcactgttctgtgaggcctgcagctccctctccttaccccattccacatacttggctcaccctgaagcaactctctttctttcttggtcttctcagagtggctgggtgtggcctggcgctggctggtaaagcccttggctaacaggaaccaggccctgtgtttccagtaggagggcatctgctgaggctggctcaggacccagtaacctgagttctatgcctactgtgcctccaccacactctgtgacattagacaagtcacaacatctctaagcctctgtttacctttctgtaaaataacttaatattctccacccaacacccctcactgcaaggatcagatgaaatcagctgtgatgtaaaagtctactgtcttggacatcagcgttttcacctgaccagcatccgttctttcccgttctccttttctgctcatggtccccagttttcctttggggaaccacttctctcaaagtcagtccctgaagtggctgtggctggccccccacccctccattccccagagtcacatactcggcccatgcttggcaaatcagcattctctacccttccgacctgaggagcacactaaacaaatcagacagacaagactgagtcatgggactgctgccggcactgctactggggctgctgagttgacggatgagcttggagcctcggaagctatcatttggagagcaggcttgctacaaacggggtgcaggagacgagggagtgggaggctcggaccttgcctgggcctctccatctagatggacctaaagcaacctctactcccagacttttcagcctctcaaagccagtgaattctcctcatggtgtcagccagttgggaatgagtttctttcattggcagttgggaatcctgactcattcagtggccaaaacataaaaagtgctaaagaaaaaaaaaaggagaacttctcccttttgggcctctttggccccccctggtctgcagacagcctccctgcctttctggtcgggggtcggggggtcggggggcaccctccatgctgtgcacctcgttagaccctctgcattcactggctggggaagggccagcgcacctctcccatgaacctgttccagacagactggaagggaagagggccgtcagccggccatcattggtttggacactgatttcctaagtgtaggactccaacctacccagttctgcctcatcctgccgtaggtgatccattctttctgtgggaagcccaccagttctgcagtccactttgaccatctcacatgcagcgtccacacactgcctcagaaattcctcacactcaccaagctccccaagtctgtgtctgctctggtcctgccccctcctctctgcttctttccccgcctccttgacctcctctcgtctccctctgtggggtctgtccctccctgcttcctgcctggccccatcttggcagcctctgctctggctttcgaaggcctgtcagcgcattctgcgtggcatcctcgccagtgcaggcaaggagagcctcatgttccattccggctgctgggaccgcctgtttgtggagacaccctctcccgtcccctcctgacaggtgatggcaattagtcatcctgatctttcacactggattcaactactgatcccagtgtggactgtgctccaggctgggaggtgatatcctaaacacctcctctcctgtgggacagggggacatcttcaaggctcgtcctgagatgggcacaggttatgatctcacaatctgtggccagccagcatcagcttgagacacagtcatgtgtaggattgccaaactgttgtccatctgaaattaaaattgaactggcatcaagttattttttgttttgactaagtctggcaaccctggtcaggaggctaaagctggtgaggttgcagtaagttgtagaggaggactcctcacccacaaactctagaacaggtacccatggagtttttacacctgcaacacttttaaaaagaggatagaaagatggatgttctggaagacaaattattgtctatttagaggtggatgagcttctaggactcttccagccctgagcccgataattccaggctctcacatctgtgttttgggaatatggctgtatttaaagtactgtgaactctgaggtctgccccaggccttttttctctcaggagtcaagctcgggatttcacggctgtctgtgagagctacagaaagcaactggcagtgaccctaaatgccaaagggcctggagattgatgaggtggagggaagatcgcaacagactttagcaggaagggaaatgaactttaagataagtttctgcatattgaatcctaatttttcattcactttcattcattcattcatctggatgccactccagattcctctggaggggaaattttgacctccaaaatgtaagatgtaatgaaatgactttaaaaaaaaatagctaaattgcatattttaagagaaaatattttccaaggtgataatggtaatattcaaaatagatttccaagcataaacacaaagcgattacaagtgtgtttggcccagagtttcaaaacatccagtgacagcttaattgagcagaacactaggctcataaacctctttttctcagtttcctacagcagcagacatcgctgcgtttcttggctgtgtgggttgcatttcagggcacgctgagagctgctgcctccatagatgtcatccaagtttctctaagcaaagtcaggtggaggtgtcaaattagcagtcaggcagtgggtccacaggcagcacaggtgatggggcaggggagcagctctgcagacagagctcataaagggatgtgtggctgcaggcaggaagggagaggggggctcaaggaatatcctatagaaggcagatctctaggttttgtatttagaaccagcctctagatgaacaataacacaaaagcacatttctgttcattgtgtttctacatttggggtacatctataaacacgaagaccagagcaggaagttgtggacatggaaaagaactttgcagcacctagcagtccaggctccatgaggaaaagagaactccttcaggacttactatcgtgtgaggaaaatctgtgcatagagccaacctagcccgggagccaaaggaaggcagacagagtgaagacaggcagctttggccatggttttgctatttgcaagtttggaccacaatgtgtttctgtttctctttcccgccctccctgattccatcacctccagtctcccccatcttttccacttcacccttctcagtttccagcagtcagaggacggggtgtatcctgggccgcaccatcccttggctctgtctgtgtggcgtgtgtggtgggtgcaatgggggtgggtttgtggctcatgaggatgaaaattgttcttcacagtttggaatgctggcctcatgtgggggctgctaagatttatctggaaacagtatactgtgaagatttctggggttttgacttagtgcgagagaagggttcaggtggggaattggaggaggtttttaggcctttcttctccctgtgaagaaaagatcaatgagcaaatgacacccccaccccagcagaaagagggaaatagaaggatctggttcatggccaaactcacaactgagtatatagatgacgagtgaagggtcaattcggaagaattctgggagggaggaggagggagataatgggagagctggatgcttctggagaaaggagggagtctgagattctggatgagaagcatgaaggagagaagactgtttcagagagcaggcgagagaaagagtgattccaggagagagtcagggaggatggacacaggctttgggagaaaggcagtgccattggaatggcgggggagaagtgctgcagaaggctcgtgttaccggaagaagcaaagcctccctctgacccaggacgcaattgtgctgcagccacgtgaggcggagtcagcctggtccccatgccatgtggctcagaccagctcttcattcattcattcattctttcctttactcatcagagttctcactgtgtgctgagccttatgcttcctgccctcaggaagctccctggctggtgggagagcccagcttcagtaaaaacttcccacagtacagagtggggcagtctggatgaaccaatcatcgttcaagagctggcaagagaacccagggtaggctcggcccttggaaagtggaggactgcccagctagtctgtggactccttccaggtttgggtgagctggcctggactcttaccccctgtatggcccacctaaagattcaaggtgggtattcttgcccacttcaggggtcccatcctagacaccagggcccctttgtccctagttacccaggactccccaccccagcctcctttgttcacagtagcatgtgcgctctgggacttcccctctgtagatcttccttccctcagtctgcacaatccttcaggtttttttctgattcactagaaactcacctgaaacagtcactcctcctgaaggccgacaatggatgaaaccttcacgcctgaccactctcaatcatctttgttgtcattgtcatcgtcatcatgatgttttgctttataagacttcttggccaggtgcaatggctcacgcctgtaatcccagcactttgggaggccgaggagggtgaatcacttgaggccaggagttcaagaccagcctggccaacatggtgaaatcccatctctactaaaaatacaaaaattagctgggcatggtggtgtgcacctgtaatcttggttactcaggaggctgaggcaggagaaaccaggaggcagaggttgaagtgagccgagatcatgccactgcattccagcttgggtgacagagcaagactctgtctcaaaaaacaaaaacaaaaacaaaaaaacttaataactttagtttcaaacaacccaatgaagcagataagcagagaatattacttctatctacaggagggaaaagctgaggctcagagaggttaaaagacttgccaacagtcacacactggagtggaaaaggcagagtttgaacctgcatccaaagccctttctgatccatgatacaggtggtatggcagaacagtggggaaagtatagcattttctctaaatgatgcaggaataactaagattcatgagtagggaaggggaataaaatgtaatttctaccttacacagtaaacaaaactactccaagtggcttaaaaagttaaatgtcaaaaataaaaatttgcatttttaaataaaaatataagtgaatatctttctgatcttgaagagtatggaatgaattttaaaataaggccttaaaagtactaatgttaagataaaagacagattaagtcaagcacattaaaactaagaatgttcatcaaaagacaggcaactggttatctacatgcaaataaataatgttgaaccccgaacccacaccagatgcagaaattgactcaatgaatcaaagacctaaagaactaaaactataaattcctagaggaaaacataggtgtaaatctttgcaaccttggattagacaatggtttcttagatgtgactccaaaagcataagcaataaaagaaaaaaaaaccagataaattggactttatcaaagttaaaaaatttgcgcttcaaagaacatcatcaagaaaataaaaagacaacccacagtatgggagaaattgtttgtaaatcatacatctgataaagatatatgattatattgtataatataatatatattacatagtctagattgtatctagactataaaataaccattacaactcaaaaattaaaaaagccctaaaagatctgaacacttctcaggaaaaaaaaaactacacaaacagccaacaagtacataaaaaggtgctcaatatcgttggccttcgagaaaatgcaaatcaaaatcacaatatgttaccacttcacacccaccaggatggctatcatcaaaaagacagataataacgagtattagccaggatgtggagaaattggaaccctcccatacacttctggtgggtatgtgaaatgatgaggccatttttgaaaacagtctggaaaacactcaaagggttaaacacagagttaatacatgatccagcaattccactcctggggatataccaaagagaaatgaaaacataggtccacacaaaacttgtacaaaaatatataaagcagcattatttgtcacagccccaaagtggaaacaacccaaatgcccatcaattgatgaatggataaacaaaatgtggcttattatacaatatattatttggcaatggagaagaatgaagagttaatatctgctacaacatggatgaactttgaagacattatgctgtgtgaaagaagccagtcatgaaagaccacatattgtataatgtgatttatataaaaggtccagaattggcaaatatatagaaacacaaagtaggttagggactgccaagaccggggggcgaggacaggtgggtagtgggctgggggcaatagggtatagggtttctttctggggtgatgaaagtattttaaagctaatcacggtgatgatttcataactctgtgaatacagtaaataccattgaattatacactttaaatgagtgaatggtgtgatatgtaaattatagctcaattttaactttttagtttcagaagacagctaaataaaataaaaacacagatcacaaaccagaggggaccctttccagtggggggaaacatcagatcccatgacattgagtagggacgtgcctttgagcagatgactttagaggacttctaaaccacaccattgggtggtacctagacctggccttttcctctcaggccattggcaagctgcaccatgttgaaaaagtctggggttcatggtatgcccaataccttggactcacttgtcctttcctagcaaaggagagtcatttctaggaaagtggaagaccttgatcaaatcagcacagaacaggccacttcaggtagaggtgagaatccagccaaaggaggcattcaactatgggcagagtaacaccaatggcttgttgggttggcttagctgatgcttcagaatccttctcctaagcttggatcctaggaatacaattacattttgctctgaggcatgtcttgctgacactggaatgattccattctcagcacccaataacttgcccacatacacatactccatcctaccccaagagagaagagccgagtcatatgatggggcttggaagtcaaaagcaggatgacaagggagagtaaacccctcaccaggctcctcagggtctagctgtgccttccaaaacctgttatgggaacgtgtgacccctgaatccatcagtggacaggttaagtcagccctgcaaatacatccaacaggctcgaagccagagaccagggcaccagatcacattgtcctaaaggccctggagagtaaagatgggcattcttcccccagaggggaaaggctgagcaaagggcattgctgtccctctcccagactcatgcctattgtgtccctcttctctgcctctctcatcctagttaccctgacataggcccgtctggagcaaaagcccacaccctagcttgcagctgctgggccaagctggcaacttgggcattctgtgaccaactccctggatgctttctcaaagtatgccccctatctatctatctatctatctatctatctatctatctatctatctatctatcttcatctatctattatgtatctatcatctgcctttctattacctatcatttatctatcaacaatctatctattacctatcatctatctttctgttatttgtctactagtatcctctaatatctacctatctatcttataaagctggcccaagcagggggaaagattcaccatgacaaaacaacatagagtaaaacctgagtattccttctctgttgaattgggcttatttccttctaggcttttcacttagcatatgcagacacatctaatatccatctatacatctactttcttttaaagatggtgtcactttttcagagagggtcgtttgtttctttgcttgcattcactgaatggtcagtagacactgctctgtgggatggtgaaacccgggcctgcagacttaacctagggagtaagggagaagaggcaggcctggggagcaggcccagaccttacacattctgttgctaacaaggtttgctttgcttcccctgtctggtctcaaggagactcacctcagggtgaggggaatgcccagttcatttccagaagctcttccagctttggctcctctgaagtagctactattatataatctatacattagagtaaacttactgtaaattagccatttaactcccacatgcttatgagtgtgtgctggtccactcccattttgaagataggaaactcaggcacagtgaattggatgacttcaaagtcatacaggagtgcaagacaccatcagggccggaacttgggtcagagtagcccatgcatttagccaccatgccgccatcagctcctgatcaccagagcacaagtcagtggccctgagtaggcacaggccagaatgcagaagacaggctgtgcttgggccggtaagaacctcagccagggtcaccagctcctattctacacagtaaagcaagccagatatgtcctcccagagagagcctggcctgaccccgagtgtctgtgtagctagtgggcagcccaacagctacgctccctgtgctggggagagggcaggcacagggcccaggctcagctgccctctggggcagcataggtgctttcaattcattcaacacagcgtctgagcctcctggagtttcccacagggagtgaaggtctggctgagccaggctgcccagcctctagaaagagactcaaagacaaccctcctgtggctcagaggctcagaggagggttcattccaggaaggagtccgtctacccaggagactccaggtcaggatccagctgcctctgctgaaaaagcacccctcccctgagacagccatcccacacagaccagcgtggcctagtgaactcaccctggatccatgtcctgaattatttatttacacccccgccaccccagttatccatatcatctggctggcctcaggccaagtcgctttcctcctggtcttgtctgcggtgacaggacagggagaggacacatccacagcgggactggggagcctcagcctaggctttcagtcttcttcctcttcctccaccgccaccagcacccctgtctgcctgcaattgaacccagatgccaggaaatatcttggttgtatggctgaagtgaaaacacatgggtaggatgaaaatccttctctgttacagcttcattactgccatccccggaaacttgcagatgcagagggagacttctgagcccagtgtctggcactgtgtgtgcaggaagtgcagcctggaccagccatgggcagtatgcacacggcctgctggctgctggcacacagccaagttcaactagcttgtgggagagcagggggagggacagaagctcctccagcctcagatccctatttttcatggccattcaaaaaaacttaggatcccagataccagtactggccctgacactcactggctgtgtgacttcaggtaagtcacatcacttctctgagcctcatctgtaaagtggcgataaaatgccttcttcttggagttgctgcagtgtagcaaaggtacttttgggaggggaaaaccagtctgagggtataagggagttacaaagcaaagccacagtccctagcccacaataccaaagccctcaaagctctgagaaccaaagctttttgtaactcagttggcagcaaaacctgagctaaactgacatgaagctatttattgcatgtaattatcccccttggtgtaaatattcatgttttgctgcaaaaatattacaatgtttgatgagaccttggtaggggagggatgtgtttctctacagcacatctcgatttctaaagttctgaaagctaaaacacatccagccacgagggtttaaatagggagctgataacctgttcttggaaatgaagggaaatctatttgttgttttaggaggttaagaaaagtagaatgtctagagttgggccagatttgaagcctttcttaaaagccaccaccctgtcctgctcacatgtcagctgggatcaactcaggaataattaatagcaccatttatcaagcactgactgtgcatcagatgttgtgatgatgcttcataattattgtttgttgtgatctcacaacagccctgggaggtgtttctatgatttttcttttgagacagagtcttactctgtcattcaagctggagtgcagtggcacgatctcggcccattgcaacattcacctcccaggttcaagggattctcgtgcctcagcctcctgagtagctgggattacaggcatgccccattttgtacattttttgtagagacggggtttcaccatgttgcccaggctggtcttgaactcctgagctcaagtgatccacccacctcagcctcccaaagtgctgggattacgggcatgagccactgtttccggcctctgtgatcttgttctacagatggggaaatggaggctcaggaaggaaagtgacttgcttatgcctgcgaagctggtaagaggcagattcaaaccttgtctgactgactctgggggacttcaagctggtaaaacagtggagcaaggaaggcggtctctttgggacaggggaggacaccccatccagatcacagtggagggttcctctgttaagcccgaacctccgccaccttccatcacatgtctgcccctttctctcctcctacagggaccaccacccctaattatgcctgagacttacctccttttcccctctgtgggattatgtgctcccagactccccctgctcccaccctgttggctacaattttgaatgagctcatccacaaaacaggcctcttaacttcgcaagactcttgcacagaccacacaaggtcatggatgtcagtgggcccgttaagcacggggtgccacggaccactgcagggggattaggcaactgccctggggaagcaacaggagacgcaccagaggggtctcccaagggctcaggctgacccctggaccatctcctcagcaaaatccatctttgtgacctcctgcctcctctccactgacagccacctgagcccgggttggatttgttttttaactacacaagtgaatcatgaacacattctcattagaaaaaaaatacacaagtacacagagtgaacagtgaaaattcgactttacctctgccctttcaagcctattccctccctggggtaactactgtttacaactgagtatgtatcattgcagtccattttcttggcgtttatttacgcacatatatcatttggatttgttttgggcgttttatatacacacctcacatagtgttctgcagcttgctgttttctgcttaccatatgtcttggaagtcttccctcttcagttcatataagtctgcctcattcattttaatggctgcctcctagccgcctgtggatgcatgtgggcttatatcaccattcccccactggtgaacacacagctcatccataagtgaacatctgggtgtctctgtcatcatggccataggtcgtctgcaaagaacatctcttatgtggactgagtgcctgctggtgattactttctggaagaggagcggctgcatcaaagagggtgacatttttcaattgtggctagctttgccaaattgctctctaaaaggctgaattaacttaggtctcactaattgcacatcagagtttggggcagcagttctgccagttgactgggtccagagcttcctggtaggttgctgtgagatggctgggacccacttccctgcggagaagtcagctggggctgtggaatgagcaggcccctctgcagcagtgtgttgggtggggatgactgttgcttgtacatggatcatagaagtggcaatcaatacagtgattagacagagtgggtaaaagcagaggatttggagccaaacagatttgtgtttgcatcctggctgcatcacccatgaaccatctccaacaaatgtgacttctgtgaatcattttatctgaaaaagcagagcagcaatgaccacatcagagctattgtaaggcacagagctattgtaaggtttaaccatgatgatatacgaaaagcacttagtatagtccctgcatatagtaaatgggagtacatggaaattgacatttttattatgattatcattataattattgtgaatataatggtgatgattgttaatatcctgatgattgttaattccagaaatacaggtccctttcctcttggtggggggatcctctcatcccccacccatgtgagcccctgagccctgtgcaagcctgggcgccctgtcagttggttggtggctgtctcagtgcctgctgtgtgcagaggtctgagcccacaggggatgggtgatggtacccaggaggcaggatgagctgttctgccttccaggctagaagggtagacaggacccaaccggataaacaccagtaaacagaggtggggtgtcttacaaacagaggctcatgccaacgcagcttctccgagataaatacatcagagtcaactcactaggtgggaatggagggagtgggtgggtgcagagtgtaagtgggttgaaggtggaggcaggagagagtgaagccagacagaaaggcaaagtgaagggcaaaagtgaggtggggggtcggggagcagcatagaaggtggcctgtgctcctggcagcaactatggaggagaggagggtgccctggaccagctggccaccagagtcctccattcaattccctgctctgcatcttgccagctgttggccttggggaaatcctgcttcttttctgggtcttggtttgagcatctgtaaaacgggccgtgcaggggctggttcaacttgagtgctctattcagagtccttttcagcctgacgcatctaggaattcctgcctcataataatatctctgctctgagcactctcatcttgaatttgagtcactgtggccatcaccgtcacccctgcaaagcgccagcatgcaacagtctacacactatatttccatctgttttctcatctggtctgcccgacagccttgggtgcaggtggagttgagattcgagtctcatcttacagatgagagacctggagctcacagaggtgagatgacttcctggagactggaactgagtagaggggtagcatcttgccctgccaggtgccatcccagcaactaccaagctgaggaccaagttgcagatggtaagtcagactgaaccactcagtgtacccacatataccacccatggttgctgctgagccttggtcacacgctccatgccaggctctttgcccatgtggtcttgtctaatcctcacagcaactctgaggcaggtatggttgtaaagttacagatgaggcggtaaggctcagagaggctgagtaattgccccaaatcacccagccagtgagcagcacagctgccttcctaagagtcccaaagatttacccttcctttgctcccacctggagggggagctcatgccctcactaacccctgagagacccactcatcatctatttcattccaactcatcttcaaggcccagctcccttgccacctccaagaagccctccctgaccactctggtgactcccaggcattcacccttctctttcccctgcactcacttatgggaccttcctgtctggatctccctggtgatcttaatcacaaggcgctcgggagaaagggaattctcctttgtggccagggcttgtctttccaatgtgggtttacctctttctaaataaatatttttcaatgcaatggcaaaagaaaagtgtgtttattataaaaataaaaagtgggccagccgcggtggctccatacctgtaatcccaacactttgggaggccaaggtgggcagatcacctgagatcaggagttcaagaccagcctggccaacatagtgaaaccccatctctacgaaaaatacaaaaattagctgggtgtggtggtgcatgcctgtaatctcagctactcgggaggctgaggcagaagaatcgtttgaacctggcaggcggaagttgtagtgagccgagatcaagtctggctgcactccagtctgggccacagagcaagactccatctcaaaaaaataaataaataaataaataaataaaaaataaaaagtgtacagaaccactaggctagtggttttcctttctttaactccaccatataaggtaggacaatcattccacaaacctgaagttctgtcttagagtgggctccccaagaagccgcctctgagatgagaatttgagtgcaagtcatgtattcgtgaggtttatttgaaatcattgactggtagttgagtggggaagtgggacggggaatggaagttgcccaacaaagagtgtgtttccaacaggtgaccactgcaggcaaccggggctcaatctaactgggagctctgggaggcagcacagaacacacacgtatgaggaaaacagtttttccttctatattctcagcacctgtgatgccagatatctggggtttttttccccataccaaccagttctccaactttcagtacaccagctgagtctcgcaattcaattatggcactagctacccagagttagtgcagagcccatggtttaagggttcagtcctacaagatttccccccacttcagacgccaatcgcaaggtggtcctcaggtaacccgtacttctgtcccacttggctccaaatcaggggttcctgtgacccactccttggattccgtaatttgctattgtggctcccagagccactgtgactcacagaaagtgttcagggaaatgcatttacactttattataaaggatataataacagttacagatgaatagccaaatgaagggatccgtagggtgagttccagaagagtcctgagcacaggagcttctgtccccatggatttggggagcaccactcccctggcacatggatgtgttcagtatcttggaagctctccaaaccccatactttagggatttttacagagaccttatcacgtaggcatgatatatgaactcaacctccagcctctctcccctcccaggaggagggaaggtgggcatgaaagttccaagattctgctgggcgcggtggctcacgcctgtaatcccagcacttggggaggctgcagcaggcagatcacgaggtcaggagatcgagaccatcctggctaacatggtgaaaccccatctctactaaaaatacaaaaatcagctgcacgtggtggcgggtgcctgtagtcccagctactagggaggctgaggcaggagaacggcgtgaacccaggaggcagagcttgcggtgagctgagatcatgccactgcactccagcccgggagacagagtgagactctgcctcaaaaaaaaaaaaaaaaaaaaaagaaagttccaagatctaatcacagctgtgcctttctggtgaccaccccccatcctgaagttatccaggagcccatcaagaatggcctcattggaacaaaaatgcttctagccccaggaaattctgaaggatttaggagctctgtgtcaggaactgacacagattagaatattagaataaaatattttattagtatattctaataaatattagaataaaagatgcttctagattattagaataaaaaatgttcctagcacccctatcacttaagaaattacaaaggttttaggagctctgtccagaagcccaaaatatatatttcttattatttcacaatttcatagcacgcctcatagttatctttcccaagggacaagggacctggggtgtttatctgccaattcccaacagtcatggtttgagggttacttctgtgggggaattgattccctggcacttctgggctgccacatgggcagggcaggctccagcagtcacagagaaccctcaggcaaagagacaagttgctggaagctctggggagccggacaccagcagcatctgccacaggtacctgtgtgtaccaggctcatggagacacagcagtgagaaaagtcgaccaggtgtccacacacagggaacttgtaacctaatggggtaaacagatatttatgaaacatgatgcaagcctataataacagatatcattataaatgagcctaaggaaatgtttgtggttctggcgacagatggccaggattggactcccaagtctgcctctagtttagaacaagttacttagcctctctagggctcagtttcctcaactgtaaagtgggaattataaatgtagcaacatcttagggttgttttgaattcatttaaattaatgcacataaaactttcagcacaagggggtcacagaggacacctgatgattgctaactggtgttatgatcatcatgtttcatgtaattagacttcaaagagcagtttggccaagtctgggctgcaggggcttctattggcttttcatggggccccaatgccacacagcataaggagactgctggccgggcacggtggctcacacctgtaatccaagcacgtggggggccgaggcgggtggatcagctgagtcagcagtttgagaccagcctgaccaacatggtgaaacccaatctctactaaaaatacaaaatatagccagacgtggtggcgcacgcctgtaatcccagctacttgggaggctgaggcaggagaatcacttgaactcggaaggtggagattgcagtgagctgagatcacaccattgcactccagcctgggcaacaagagcgaaactccatctcaaaaaaaaaagaaactgctgaggccagtaggagaatggctctgtcatggcaccctggtggccctccacacatccacacaggcaaaggcttcgatttcaattaacctaagatcaacaacagccatcatttttctggtaccttatgctgggtttggttgaggctttactcatttaatcctcacaataaccctatgaggtaggtatttgcttcagaggttaagtaacatgcacagaaaggttaaataagttgcttaagatctcacagttcataaaggcagagcttggattgagcacctaggcctaagtgctcagctgctgatgggaggtaggggtggggagaggcattcacagacagaagtctggctcattgtggcctgggctggtcctgcatgggtcccgagctctgcccggtggtggtggggagaagtatgctcagtgtcctggccctaacctgggccctttctatcagctcacaggaagggaggaagagccagggcctgagcccgcttggccacacagccctgctccttgctaacccggctgaccctagatcccaagccgagaaaagaaggagctgccctctcctggccccatctgccggcggcccctggttgtggccactggtggtctctggtggctgggcttgctgccggcaggcagctcacacagctgctgtgcacagcagccagactcccccagcagctccccagggccaagagaacgttccaggacagcttggagtcattaggcactctctgcttactgctcgtggtgaaaggccggcttcagatccagggcctcttctgctgcccgcctttctctcaatcactggaatagctggcaaacccccacagccctgtggggaagggggcagggatgatgttcagctgtccaacattgctcccatccctagctttgttccactctgctcccccatggcttctgctcccactgtccagcttgagccactgtggcctttggaagacaatgaaaggaaggctgggctccagtgttgagtctgctgtgtggctttgggcaggtcacataacctctctgggtgtttgtcattgcttgtcagtgggaacttctggtccctgctttccctcctcctttgtggagatgaggaaagcatgtgtgaaaaacattgacatgggaaagcagatgctcacagaggctggaacacatgttatctgagggttcaggccttggtcacctcagaggacactgaagcacacggctgaacgggtgttcaggagcatccaccttattttaaaaggaggaacctgaggcccagccactaactgagaaatctggggttggaagctggccttctttccactgccccaccttgtcatttgatgaaagtgatgaggagcatttgcttagagggcattgtgtgctggacagtgtctgcgagcttgccatggactatgtccactaatttttataatacgaggaggggattagtggcgtccaggcaggaggccctttggcaatggtgggctgtgtttacttaagtagcagtgtttcctaggcccaggaaacctaagagaaatctgaaaagatgatctttcaggacttgctgtccagttggataagagacaatatagggatgctttctgggaccccaggagcacgcctgccttctgggcccagtgtggctgtgatggggcatgaagtgggtgcttctcccacactctcttctcagcttgtgctgggagagggggtagcacagggcaaggtggcaaagtctccagttagtgccaggcacaaagtttcccaggggaggaggcattgatacaaagcagggagaataaacccaggggcatcaccaactccattttgaatcccagatccaccattcactagctgtgcaactctggacacatgacataacatctctaagcctcagtttccctacctgtaaaacaaccccttgcaaggatttgcaataactcatgggaagcgttggacactcagcgagttgggagctacaatggagccattgaagcaaggacattgaagcgggtgtggtcagctcagtctggaaaggaaacgtgagctatgcagaggatggctgggaaggagcaggtagcaggtatcagggctctttcagtctctctcacacccttgttgagggagctggccactgctcagactcctcttggccaggggctcctgaggacccaggccgagcccagctcagccagacaagctctggcagaggccccactttctcctccaaacaatgttgttctcccagccaagggcagcaagaggtgggccaggaagctgacagcaccagggaggcttcctggctcccctgccctgcccagcccagccctccatgttggggtacatcccccagtctggtctggctgccaaaggtctgtaaggcagaaacagagttacaccaccaccgcctctcacgtcctcagcctccagctggtcagactctcgggaggggcctggcagctcaggtggctctgcaccttctgtccttgagctaagggaccccaacgaaggcagaactgagtcactctcctcttcttcaggcaaaggctgggggctgagggctctggcctcgggttccctcgctcatctcagaggctctgagacatagagcccctctcaacatggtcctgtgagcgtgtgcatggagtgtacacgtggacatgtgtgtatgtgtgtgcatgtgaatgtatgtgtgagggcacacatgcatgtgtgtgaatgcgcatgtgtgtgtgtgaatgtgcacacaaggatgtggatgtatgcacatgagtgcatatggtgcatgtgtgggcagggaatctggagactggagcttccagggctgctggtggctgcagcaggctgagggtgatgagtaagctcacctcctcttgctctcctggcatccactgagtcccagagttgggccatgggtgccgtggcgacccaatgcatgagaaagaccccatctctccctcttggggtcacgttctggtgaggggagacaggaatacacaaataaaccaacaacacgatgtcagagaataatgcagggtgagaagaaaatggaatgggggctgtggtgggcatcctgtccttttcttcttcctcctcttctctgattttgggagtgcagcatggaatgaaaagtgaggtatgagagcaagggggtgatgaaacacttcggcgtggtgggtgaggggtccgggaagacccacatgctgacgcttcctggccttgtcagcttgtcccccaagacactcccctgggatgaaggacaggaagcccaggtcttgcccctgaggtctggtggccctcgctcctaccaggcagagctgccatccttggctcgtccggaagccaaaggcatccccactcttccatttctgagtctggtagtttgctgctggggagaaaaatgaagaagaaggaaaaaggggaaaatcccatttcaattctttggtcaaagcacaagtttctctcctccctttcttcccttcctccctccctcccttttttttcttttattttcttcctttcccccaagagtagaaagaaccagggaatataaacaaaaacgctcttagaacaaatcaggccatcttgttcccaaatcccaggaaactcctagaagctgggatctgagcaaagggacaaacggagctgcaaggccagtgggggtgggaactgggctgagtcagggaaggtctgtgggttccgcggagcccccaaaacagctgccttttggggtccagatgtactaccagaaggaaggtccaagagaggccagaggggagggctgaggctgcctggagctcactgcattcctgccagggtgagtcactgccaggacgccctgctgtgccgatttgcagcaacagccttggtgtcccaggactcttgggccccctccagataggttcctccaacccacaaagagctctcctttgcacatcgatgcccaaaggactgtcataatcactcagcccatttatggctttgttttcttccaaaacgtagccccctgcaaggaaaaagccccagccatatcaatcatttactctttgatataaatgagtcatccagcccttttccaatggcaggtttgaatgagaagaagaaacagagcatgaggacgctgcatttcacagagcaagggaccccaaggaaggcatggacctttcgtggaggttgggggttgcatgagggggaagatccagaaaaggcagaggaggagctggacacggcatcctcagactcagggtgggccaacaccgccctgaatgaaaccaaggctttgcaagaccaacataaaccagagctcagcaagtttattttctcatgaagagcgaattctgtgaaagacagagctaagtcttatcaagcactgactaggtaccaggtacctcccaagtgctgttcctgcagtaaaggaattctcacaacccccagagagagaatggacactcagaaccggttggagcaagaggcagcgctgggagagggatccgcacctgccgcttctggagagcttgctttcccaccacactacgcagcctctggaaccaggttgtttgcagcacaggtgggctgattccagggtcttatgaccctgcaaggctggaggttgtaaggcttagagatgggaaatgacctgaccaagatcacacagcaaaataccacatgggcaccccacagcctcactgctgcccagattggtatagcaagcatgcccttgtctgagtcactagtgacttgctattgaatgaatgaatgaaccaacaaatgaagaaatgggaacagaggctcagggaggttccatgtctgacccgagggcatatgtttgggattctcagggcaagcctcctcagaaccagctgtcccagtcctgcccagcctctatacagcacttggcttcttctcctagcaattctcctattttgtcacatttgagttcacagcctccagagcgacgtagggccttgacttcctgttcctgatgggcaggaaaggtcatgcagctcattagtggtggtgaggttggtgctgtgtccccatctctagccaatcataccaaacagtggttggtctctgtgaccctgtccccaccatgcctggactatgaaatcaaaggggttttcttgaccctaaaggacagtcaagcctgattcaggaagaagggcttggacatccacccgtttctccacggcgtgcctcccctttccaagcagcattttagcgttgttcacccagaccttcagacttcatggccagctcattaagggatcatgggtgcaaacagcctgttgacctcaagggagaaagtagagggttttccaggaaaggggtgctggtgagaagatctcctctcgcacttgtggctcaacttcagtgagttggatgcccagaggcacttcctcttcagggtgttggtgcctccctgtttcctgagctatggcagctcagaggggcaaagcaaaggtttccagcctagagagagcaatgctgcacctttgccagccgtagcccatagctgcttattccatctcaccaaagtgcaatcaacaagcactcactgggcacctactgcatgtcaggcactgtagtgggccccccaggtccaaagctgggtgaggaaccagactgcccagggtcagtcttaggttcccagccaggctatcagcatatcatcctgatggcagggaccaccttccatctctcctagcatcatgcactggggcgggactggcctcatgggggaggccagtatagaaaggatgatgggttagattgcatttatctccattgttgaagggatttctttcagacatcttgagttcttccagcctaaagcctggaggtttttttgactgtggaagtgcacagggagggggggggtcttggaaggagcatgggatcttggaaggaagagaccagagaaagagctttctcactagagcacaacagagaggttaggagggcaggctgtggagtcagacagccttgtctgaaaccatggcttctcatcaggctgtgtggccataagtgagttactgagccttgctgagtcttagtctcctcatctgtaaaatgaggacaataagaatacttccctcatagaattgctgtgagcctgaacagagctaatatgtgcaagggcttagttcagtacctggcacatattgagggctggataaataggagctattattttcccatcggaatagaggaaatattccggccccaatgccatcactggatatcaggcctgaaggcaccctccagagcagttattccattatggccattctacaaaatggaagactgacgcccagatatgggaagctgcctgccaaaggtcacatgagttgctaataaaatgcaacattagggtcaaaatcccagtctgctgactccccagttggtgcctttttcactctcttttgcccagagttggtagagtggactcaaagaaccccttaaatccatatcccaggccccccttcttctccagctcccagcacagtggggagattggtgggctgtgccccctcttcccctggtaagagcctcagaagctgattccactctgagccaaggaagtctggagtgtgcaaaggtgtctctccaggccctgaagccaggagtgacatcagcaaggcacaaacatcaaggagcagcagctcccttcctggagctctagtccccacctctcccagcctacctctggtccatccccatggctgtctgtgctaggcttctgggagatgaaaggaagccagacattaatggtgacaggtgaggcagtcattgtgcctctggcacctgagcacaagcttccctcccaagatgagactgcggaagctggcctgaagcctgggctctgggctgggggtcccatcacggggcatttggcacccaagggaaatgtgggtacagacaaaacatcccttcttgcacctggagtcttgtctctggccaaacctttttcctgctccttctcccttgccaccacctcatatttgtcaaaattccagcttgatgacatgaaactcacacatatggccaaggaggaagcagagggagacatggttatcatcagcctggtccataggaagtggagagtcagcttactgtcttgaggagccactagccctgagtgctagtgtaggctctgcacaaatcccccatgtggcctaggacaagtcaaagctcaactctgggattgtctctgcagccaaaattcatttagaggctcctccagggccaatactctagtattctttaatgacgcctgccaggaagcctcaactgataaccaaatactaagccctcaacccacgctgtgtacctactaactgctttaccctggtcttctggcaggataggtatatcagctagctagtgcctcaataatgctgcataacaaatgatcccaaactcagtggcttaacacaaaaatcagttattctcaaggaggctggctgtggctcaactaatccaggctgggcttggccaaggggctaggccctaggctgcttcttgttgcaggtctctgggtcagctggggacgttctgctcccagagacactgtgtctctcatcctcccaggacaaggaagtagctaggacatgctcctctcatggcagctataaaagcagaagaggaaagcaggcacacaggaagcttcccaaggagccagtaaattttcacttctgcccagagtcaagaagcagagacacaggctccaccatgacgatgccgtggcaaggcctggctggcggggccagtgaagatcggtgccggtcatccaatctactgcatgaaaatgattcagcctctttgatatggaagtcagattttcctttccttttttatttctttgttacactggaagagatgtaatacaaatatgtcccctcacttcctcatttgagtcttccagagttgagtattaggccctccttatcatcaagcaaaagaaatgagtttttcaatgtctgggaaggttgtcaggtgatagaagtgaagagagggtttaaaatagggagggatttccccagagtctaagatcagaggttggggaaagtttggaacccaattttgggaaggttgcccaagaagagtcaagtgagctgacttggcaggaggcttcactgagaaataatgtttgggggtccaggagccacatgggccctgagacacacctgacaacctaaaaacagggaattcccatcactctggtgcaggccaacaatgattgacccatgactttgcttgagtcccttatgaactgatcatcagtccagagagaaacaaccccccaggccactgggctttgctgagctgatggctgatgaaaatcccatcacctacccccaaggtacataggaggacgtctgccccatcaccggtggggtctaggataagcatacaaatggggtcccacatgccatatgctagaagttttctcctcaccatctgattcaagctgggaaacatctgtctccaaggggcctcccagtcccccacctacaggggcagtccaagaaggctaaggcatggcccttgcctgctcagagtcctctacccagatgggaaacctagcctatgttcaggaagcatcaaaaagccacatcagaggaaatgtctccttagagcaaccaaagaccttcacaaggcataagtgatcaccagcattaatggaagcatcggaatgtgaggacagagaatcggcggcgcatggagctccttcgggttatttgttcaacacctacctcaggccaggctctgtgagagcacccggagccagtgttgaatgagatgtggtttctgcttccgagatacccaccatcttaaaagagagctccagggaggcttcatgggcgggaagggatttcacctacatttgaaagaacaggaaaaactggggtagacagagggggaggtggatgctttccaggcagtagaacgcaatccctggaaggagagagggacttccttccacaggaaatttggcttgcaagagttccacaggaaagggtgatgggtggttaaaaggagtgccctctaatggtgacattttgataagtatggcaactagaggagaagggcctatcagataccaaccatgccacccacatccacagtcacccccctgtgtggttctggtccctgctgatggtcatggcctggacacatgtttcagcaaattctcaggtccatgtcatgctctttccacattttttcctcctaaagccatggtttctgcttctggaaatataatcccccttctgagagaagtgctatggaaacctcaccacaaatacactcccttccctgatggtactaattgaaggaaagggctggtggaaaaatgattttaccgaaacacagtttttattatttttaagttaatccacttactcgagtgaactaaccacgaggcactccacagcaatggtttgtaggggacctgctggaagagattgattgcggattcattcagtcattcaacattttactgggcagccaccaatggccagaggctggggtacaaggttaagtcagtctcagtgtctgcccttaaggagctcagtctgagagggagatagacacattcccatgagtatcaagcagagtggtcactacagcaagagccctgtgcatggagtattaccagaacacagaagaggagaactgaacaaggttggagggtggggtcaccagggaaggcttctaggaggaggaaaatgggagctcatgcttttggaggaataatagatacttacaggagaaaagcggggccggtaggatggagccggctgagagataacctgtgcaagagtcataacatgcagaaaggcccaaaggggaggaaaagtgggattaaccaagaaaacactcccaaattggagttgatgggatgtaacgtgaagacgggtagtggcaaatgttgggtctggagcggtcagcagaagccagaccctggaggcctgtaagccttggtaagagtttggacttcatcatgtaaacgtgaaaggttccaagcaggggagagatatagataattttgtgttttagaaaaggtgctggtgcagaagtggtatgaaggatgcatggaagctgggggatcagctgggagtaggagagaaatgtcaggagactgtcctagagaagtggttgggggaatggagagaaggggatgtatttgagaaacacttagggagctaaaatagtaggtcttggtggttttcagatacaaggacagaagaaagagggagaatcttaggatgaaagccagacttacagcatgagtggaaggtgctacccttgactgagatgaagtattctgggtgaaggaagtttaggaggggaaaactaggatccattttggatgtggggttggaggaagctgcgggtgggacttccagtggcaatgaccagccagcaggtgaatatctggactcacccctatggaggaagatgcaggctggagttaagacctgaggggcatgagctttaggaagcacagaaggggaggggcccacctatgcgttcatcaaggtgatgtaggttgtgaggaacagaacacactcaaaagttgctcaaacaataagatcatttatttatttatttcatttgaatacatttggaagtaggtgcttaatccatttggaagtagcttcttcgtcatctcaatatgatattggggacccaaatctttacctatttcagctctgccacctcagttcatccgtaagcatatgccttgtgataacatagaaggcagatgacatacccaaaggatgggtagccccaggggaagagattaggaaacaatttgttcacagatgaaatgcctgtctttggctgtgtttagtaggatacaagaaaggaataggctcagaaaataattggcctgttaagaagcagaattgaaaagggaattaaatgtccactagttagtgcttgtggggttggaagaggcaactgcttcctaaccctaaggctgatttaaacttatcctgtgtggacttctgctgtggacaatgatggaataacagatactgggcctagccgtcacccaccataaacaagtagaacactggataaaatatatgaaacagctgttttcagacactgactaaccctcagaatgggactgtgttccctgagagaaagtgaacaaataagatgaactccgtgatcaacctgactttttggccagaggcatttagcagaccatgggtctaggacgaggaaggagagcagagcacagaagcctcactgttttgaggggtcagagatcacaattccaagagctgtgcagctggaatttgtggagcagaatactgaagagacatatgcagagaaagagcttcagaaactgcataggaggcactttgagtctttggctaaaaattaggtgtgcatgagtaggatgagattccatgaggttggacaaagaacaaatattggagaaagagtacttatttgggagttgtaagctgaacaatattctgtgctcagagttgggagatgttcaagttcgggccaaccagagtggagagacctcattgagccctcagaatatttagtggaaaactcagaaaggctgcaccgtaggagtagagctaaactaacaagcctccatcctagagtgaaggctatcctagacccatcttaagtttaaagacaagtcttgaaaggaccaagccaatcttcaaataagttgctggaataaaactcaacactctttaaagaaagataacaggctgggtgtggtggcttacacctgtaatcccagcactttgggaggccgaggtgggccgaggcaggcctgaagtcaggagttcgagaccagcctggccaacatggcaaaaccccgtctctactaaaaatacaaaacttatccaggcgttgtggtgggcgcctgtaatcccagctactcaggaggctgaggcaggagaattgcttgaacctaggaggcggaggtggcagtgagccaatatcgtgccactgcactccagcttgggcaacagaggaagaccctctctcaaaaaactatatctttgaaaaaataatggccaaacattttccaaatttgatgaaaactataaacccatagatccaagacactcaatgaatttcagtcaggataaacacaaagaaaactacaccaaggcacatcaagtaaaaatgctaaaaacaaatgatgaagcaaaaaacttgaaatgcagccagagaaaaatcttagcctggtggcaaggatcaaattgatgatatcattgtcatatccattattgaaaattgcgaatggactaagagatgaatcttttttattagacatgctgactcaggcaaagagactggaggaaatgtgctcacacctaagtctgataggtttaagttacttacaataaagtatgccaaaacttactggcttaaagaaagtagagttcccagcactttgggaggccgaggcgggtggatcacgaggtcaggagatcgagaccatcctggctaacacagtgaaaccccatctctactaaaaaatacaaaaattagccgggcgtggtggcaggcacctgtagtcccagctacttgggaggctgaggcaggagaatggcgtgaacccgggaggcggagcttgcagtgtgccaagattgcaccactgctctctagcctgggcaacagagcgagactgtctcaaaaaaaaaaaaaaaaaagaaagaaagaaagaaactggaggtcaatgtggacaagagagaggttcagaaaattttaaatgtatgtttaaaattaaaactatggatgaggctactggtatatggaattttccagaatcaaatagataagaagactgttacattttaaagttagttatattgcacctttcccctccccgcaaaaatcaggcgcttagacttaaaccgttgttcaaggtttaactcttgggcttgcaaaattctacagtttgagaaaactactcagcccccaagaagggcatattttccatgcttaccttatcccaggaggataatggggggaaaatgtactttccagaatggcaaattgtgtagctccaaaaatcacgcctgcatgatgacacttaaaagctggaaggcagaaggagagtctttcactcatctccctctttttatcagagagaaacctttctcaaaacacccaggagtgctgctgggcctgcaggtctctgtcgagcctctgtcccacaggatagagtttgttaaagttgttaagaataagtcctactttaagaggtaccaagtgaaatttagaagaagatgatagggtaaaactgattattatgctcagaaacactggtgatacaggataaaaataaacatgacacagccaaatacaggatgatagtttgtgtaacaaatagagatatcatttgtcagattgcttactcccatctagaaggggatatgatagtctgcacagcatatgcacatgaactgccaaaatatggcatgaagtttggcctgacaaatgatgctgcaatgtattgtactgtcctgctgctggcccacaggcttctcaataagtttggcatggaaaagatctgtgaacaccaagtggcggtgactggagatgaatacaatgtggaaggcattgatggtcagccaggtgcctttacctgctatttggatgcaggccttgctagaaccgcaataaagttttgggggcactgaagggaggtgtggatggaggcttgtctatccctcacagtaccaaatgcctccctagttatgattctgaaagcaaggaatttaatgcagaagtacaccagaagcatatcatgggccagaatgttgcagattactcttgctacttaatggaggaagatgaagatgctcaaaaggaatagttctgtcaatacataaagaacggcgtaaccccagacatgatggaagagatgtataagaaagctcatgctgctatataagagaatccagcctgggagaagaagcccaagaaagaagttaaaaagaagaggtggtactgccccaaaatgtcccttgttcagaataaagatcaggtagctcaaaagaaggcaagctttttcagagctcaagagcgggctgctgagagctaacccaattttgtatgagaaattttcagataaagactgtaaacttattgacagcaacaacaacaacaacaaaaacacaaaaatcaataacacctggcaggctactcctcaggtcccattggcggaaattagatcgtatgacagtatttcaccaacattcatggaacttcacgtatagaaaaggcagtcttactagttcctagtaacaagttgccccaaaacgttagtagtttaaagcaataagcatttattttgtcaccatttctgaggtttaggaatctgggcacagcttagctggatggttctgactcaagctctcttgtgaggctgcagtcaagctgatgggcagcgctgcagtcatctcaactgggggaggctccacttccaagagggctcactcatatggctgctagttggagtccttcattcgtcactggctattggctggaagactcagttccgtgccaagtgggcctctcgagacacttgaaagcctgagtgtcctcaatgtacggcagctggcttctcccagagtaagtgatccatgagacagaatgagagaaagaccaaatggaaaccacactgtcttttataagctaatcttggacatgacataccattacttcagtcagattctattggtcacattgtccaactggtacaatgggggaggtggctatgcaaggtgaactccagaaggtgggcgtctttggtgaccatcttggaaactggctaccacagagcccttgaaggagacagggaagacagcaagagacctcaggtgagcctaaagagcctgttatcaaagaccacagagaggagagttccagaagagaagcattcaatactttttaaaattaaaagtgagaaccagaagctaagcattgagaaatactcattggatttgtcaatcagggtcattacattcagagcagttatgagcaactccagttgaccagtttgctgtggactgaggtttgagtaaatgctgggcaagtggagaactgcaggtgtagactacaggcaacccttgaagaacatgggtttgaactgcgtgggtccacttataagcagattttcttccacctctgccacccctcagacagcaagacccatgcttttccttcctcctcctcctcctcttcctcctcctcagcctactcaaagtgaagacaatgaggatgaagacctttatgatgatcctcttccacttaatgaataataaatatgttttctcatctttatgattttcttaacattttcttctctctagcttactttattataaagatacagtatataataaatataacatacaaaaatatgtgttcatcaaccatttatgttttagatggagcttctaggcaacagtaacctattagtagttaaatttagggggagtcaaacttatatgcatattttttactgcacagtaggtaagcactcctaagcaccacatagttcaagggtcaaccatacttttttaagagggctggatgagacggggagaagggatatttggataaaagctagaggaagacaggggaagatttcattttttggatgtgagagctcgagtatatttttaggcagaggggaagcagccagtggactgggagagtccagtcctggaagatccaggagagggaaggatgactgatgaggtagcctgttggaggaggcaggagaattggaggtcaaagacacaggtgggctggttggctttgaacagagagacacctcatcctctgaggctgcagggagggaggcagggtgagtctggctagggcaagacttgatggtgaggatgcctgggaattgagaattcatatctgatgacctcaactttcttggaaagaggaggaggcaaggttgtagtgagttgagagtgaacaatgatgtcaattaccgtggtgattgcttacacatgaaggaaggttcagaaacagtctgttctcatcagcagggcgagcccttcccttgtgatctcatatatactttctatctctcagcaaactcatttttcaccatcagtgatgtcttcagacagcacgtgagttaccacaagatatgggttagtggaatggaaatgaatgaggtgggaggtatcagaactcagtggatgtgaagaatcatgacatcttagcaaggcagagacctctgagttctcatgcgatattccatccaagggtctgtctcaccatcaatagttcatccatcctctgcgtcatcatcccactgacagtgaactcgctacctttaaggaagtctttccatttccaaacattttcaaatccttaagcttttccttcaatagtgaagtctcactctctgattccctaaggtcctacagggaatcctagagcaagtactacctggaagcccttcagagatcttagtctctcccctagaataaatgttccgttgttcccaccctcccttatctcataagatttcctgacccctcaccagatctgccttctccccaagatttcctccaggccaatattggtcctcaagattcagccatgacctggctcacctgccttcctccgagctccccaaagtgcttgcctggcaattcgcagccacccaatgttcatgtgtaattgatggaaacttatttgaaattcttcctctcccaggatggtttgatcagactggtggtcttgcaggtcttctcatcattctctgtccagatgtcaggttcccttggcatctttgctgtcgacagcctacccaaatgaggggttcatcccagaccatgtgctcaaatacatttctgtgcccagacccattcctaagcataagtcaaataggtgatcaaagactgtatttgagcgtgcagaaagaggctccagattctcattttggatctgtctgtgactagcagcattactttcacaggtcttgtctgagtttcaggggaaaccttgacagaggttagtgtttggaaatattaaccaatgttttatccctctggcatttctccttttcacactttgcccctttccttctcaccatcacccaaattctgtcctgtgctcattgtctcagagaagaggtgtgaccccagaaagcagagcaaggagtctcttgactttgagttgaaaagtcttgggccagtgaggcagaagaaaatccccataccagcaaaatttggaagaaaacatgagcaaggcaatgcttccatctctcagatttgtaaaggggctcccatcttgggggtggagtggaaagttgagagaggtcaggagtcacaagagtatagataatggtggtttccagaagagggtaccagagagaactggaggacctgagaggagacgagacctgggtcccattatccagagagcactgggaggtggcaagaccccaggcaagagaaatagcttcatggactgttccagcagcaaagtcctagtcagcctggcagagctttcccaaacactagcatggacctggaaaacagaatgacctcattgctcgtaagagcagcatgggactggacaagaagagcagatcagcaagggccctgcaaacggacaacctgcagggaccaatgaacaaggacaggcacagtgatgggcatcacaaatgacattgaagactaggtgcctggacgccccttgagcctccaggaagttagatgccactacggaaaagaagagagactccatattgacagtgattatgtttttaccatggtggcagcctgccacctgcccctgagcagctttatccacacctggacttgctgtagaagatgagattgtggactttgagttgatgccataatgggatgagacttttgaggagcttaggaaggggtgagtatattttgcacgtgggagggtcttgcatcattgcagctagagggagcactacagtagttagcctccagtgatcttcatattctgatattcatgcctttggtagtcccctcccacattaaatcaggactgacttgtgtgaccaatggaacgcagcagaaatgagattgtgtggcatccaagggcagaccataaaagacattgcagcctccaccttggtctcttggatacctagcattggggatagacagcagccatgtgttggggatactcaagaagccttggagtccacatggagaggaactgagtcctgccacgaaacaccattgagccaccttagaagtggatcctcaagccccagtcaagcctttagataagtatagcctggactgacctctgactgcagcctcacatgagacccaagctagaacttcagccaagtcacaaataatttctgatgcatagaaattgtgaaagatcatgaatgattatttttgttttaaatcacaaagttttgggggatttcttatgcagtatttgatcactaattcatcatcacccactatcagagcttccaatgtttttatccctcctaaataaagaacagagaagttgggtggtggtcccaggtcacacagcagagcttcaatacaatattcagcttctatgttcttatatagagttcctatatctgcttcatctcttcaccgacctctctcctttttagaccataccttcacttagcccatgctcctatgtccccaccatcatcacctcttttggaaacaggtttatttctcccctcttctcaaatcctttgtgctcaaaacctaaccacatacaatgtggagatggtaatgatcacaacttgtgcctaatgtcatccaacgtggccaatttgtgacaggtagacttggtagctgtaatatttgctagcaggtttgctagcattgccataatcctaagccaaaagagcaaagctggaggcatcacgctacttgacttcaaactatactacaaggctacagtaaccaaaacagcatggtactggtatcaaaacagagatatagaccaacggaacagaacagagccctcagaaataataccacacatctacaacaatgcaatctaccccacaaaagcaagcaatggggaaaggattccctatttaataaatggtgttgggaaaactggctagccatatgtagaaagctgaaactgatcccttccttataccctatacaaaaattaattcaagatggattaaagacttaaatgttagacctaaaaccataaaaaccccagaagaaaacctaggcaataccattcaggacataggcatgggcaaggacttcatgactaaaacaccaaaagcaatggcaacaaaagccaaaatagactaattgggtctacttaaaccaaagagcttctgcgcagcaaaagaaactaccatcagagggaacaggcaacctacagaatgggagaaaatttttgcagtctacccatctgacaaatggctaatatccagaatctacaaagaacttaaacaaatttacaagaaaaaatcaaacaatcccatcaaaaagtgggcaaaggatatgaagagacacttctcaaaagaagacatttatgcagccaagagacacatgaaaaaatgctcatcatcactggcaatcagagaaatgcaaatcaaaaccacaatgagataccatctcaccccagttagaatggcgatcattaaaaagtcaggaaacaacagatgctggagaggatgtggagaaataggaacacttttacactgtcattggaaatgtaaactagttcaaccactgtggaagacagtgtggcgattcctcaaggatctagaactagaaataccattttacccagcgatcccattactgggtatatacccaaaggattataaatcatgctactataaaggtatgtaattcttggcttcgctttgagcttgtcagattggctcaaagaaagaagaaccctaaccaaaaacacaagaacttaattagggagaagggccataatgtgacccatgaaggctcagtttcaacccttcgccccttgagtatgatgttttcacaatcccctttgagtttgagaggcagaaacccagtggtggaaacatggccagaggaagatggaagaagggatgaacatgtggctttggatcattctgcgtctcagctcccactgcctctcagcccagaagtcttccaccctctccccagagtgaaactctcaccctcgaagggtaagccccaagccacccctcaccgtgaatcctgtcagccctacctccccacacacccctttccccgagattctgaaaacacagggctcccaccccaattctcacttgcccttacttctctccaccttgtgtaacagttcgtttctttcacatcctacttcccccaactctgagctccttgagaaacaggagctgcatctaactcacatcattgctcacagagggcctgaccaaacctgggcctggctgaagatgttcagaaatatctgctgaattgggcacaaagctacacagtgtgacagttgacatgtggtgcctcgagttacgggatacatttgaattctgtaagaagaacgtctctgttgggttaaacttggctgtctggggcaggcaggcagagcaaatagtatgtggaatgaaaaatacgtagcaaagcccttcggtttatttagccatttgaggaagggcctgagtgggaatgtgcagcagagctgtgcattctcctgggaaacattcccaacagccaggccagtttccccagggaatgacccatacatagctccccgctgatgccttcataaggggggaccttgcctgccgttctcttctgcctccctttggagcacctccttctccagcatttcatggtaatgaccatgttcctacctaggaggaagagattgcctgacagtatgactttgacccattatggacaactggtttttccttcttaacaggccccatgtttcagcacccccaagcagaagcatttggcagggaaacagctttctcgttgaaagtccgagcctcacacaaaacacatcaggagtttttaggtcaggcaaggtgggggtggaggtaagtcgactgcccaccctattgttaggactcttggggttgccagtgactgaaaacccaactcatcaggcttgagccaaaagagaattcattagaccatactcctaaaaagcccaacatagctctagcttcaggtgcagcttgttccaggatttcaaattgtcactagggagcagtcttggtccatttctcagccctactctcttcctgttgtcttcattttcaagttggggtaagatggctgtcagcagctccaggctatacctcccagggtcaaattcagcaagccaggctgaagtcctaggaggtacaggcatatagttccagatacttgagagagtgatgtgggagaatcacttgaacctaggagtttgtcaagcctgggcaacacagtgagaccccattgctaaaaacaaaataaaacaaaaaatccaattcagcaactagtttgggtcaggctttctattacttgtaatccaaaacattctaactgattcactcaaaatacttgtgagctacttccaagtctaggcagcccatgaaaatggctgtatagagagatgcctgccccaggtgtgacagatagaaggtggagggctactccccacagagttcctggaaggagccagaggtgtggagaggcagactttcctgtagagatgcagtgctcctgagcatttgagaagatgctcaacatacatctcttttaaggtcctgtggcaagagggttagatttcctcaggtgggtagctgtgtgcctgcctccccaggtgccctgtggatgaagtgtctgggctctgatggggaaagtggggaagggaagagcttagatgcagctggtgaaatgcctcgtttctaagtttcctggtttctgtggccacctatgtgacagcaagaagtcaggtgtgtgcacatgggtcagagctcgggcagggactggggccttttcgtcaagagtcagcttctgctcctgctgcctcctgcagggccagcttgaatctcggtatagtgggtgctggaatgtaccacccagagtccctctgcggtagggtgacagctgctgatggctcacacatagctaaagggatcagctgcacacaagaccacgctcccccctggggtagcctgcaccttaggactcatgctggggtatagacacagacagccagtgtttacacagagagccagagttgagctcaatccaggccaactctgaagggcatcccagctacaagctcccctcagggttggctgagacctctcttgctaccgcactacaattaaacttcatcctctgcccaggccttcccatgttccccagtatatcccctgcatgcaaatctctgtcccagagtccgcctcctcaagagtccaagccatggcaccaggtgaggcaggtggtgtctgtgcggcccgatatgagagactggatcccaatcacttcttttcctgcactgacgggaatagtgctaaagaaggagttgagaagcacagaccctcttgtttatgttttttggggtttttttgttttgttttttgtttttgagacggagtctcgctctgttgcccaggctgaagtgcagtggtgtgacctcggctcactgcaacctccgcctccctggttcaagcgattctcctgcctcagtttcccaagtagctgagataacaggcatctgccaccacacccagctaacttttgtatttttaatagagatggggtttcaccattctggccaggctggtctcaaactcccaacctcaggcgatccacctgccttggcctcccaaagtgctgggattaccggtgcaaaccaccgcgccgggcttgtttatactttatttaaaattaaaagaactttctattattaaagaaacaatgtatgctcattgagaaaaaaaaactggaaaattccaaaaagccaagtaaattaatcatgtaattaaaagacaccaaaacacatccttccatgaaacacaatgatgactttgtgcatttgaatttgaaactatgtatggagtccttcctacttcctaggccattcaggctcccaacaaccccatgaggtagacctcattattcccattttgccaatgagacttgagacactcagaaccgtggagttaacacagagggcaaacagcaagcagacagagcttctgactgcaagttcagagctttcctcatcacaccccagaccaccaagttgatgtcagcttttctgagcgtgttcttcaatggggaagagggtggcagatatggaagaaagttcctaggccagaaaatgggaccctccctctcgtcctggttctgccatttacttactggttgatcttagacaagtattttctcctgactggggcctctgtgtggggaaggctgtggggtctatgcgcaatctgttgggcgctatgaaaatggacagggttagcaagtgcagttgctctggttgcctgaagggggcaccactgagaagaaaagccctaaaattggggagttaggacacccctcctctaacagaagacaatattcccacagtggatcccccatgggtctcccacgggcagtggagaagggggctccaggggctgcaggagcctccaacaaagccanactgtgacagggtggaaccccagagctggaacttggtgcgtctgtgtaaaaggcttaatttatcttttgtaattctctttggccaagggagacaacaggggaatgttttactttctttcttttttttttttttaaagaaaactttccattgtggaaatggcatgtgtttatttttaaaaatccagccacagggatatataacttctgggggagggagaaagctcaagggccaatactgaccctcctactgtgaaagctgggtctgggtttcttttgccatttgattcttccctcctaggcctctttcctttaagcagaacagaaatcttgctcgtggatgtgaaggagaatgacgaagaggagagctgaattccagataattaaaatattactacaataagagtgactgacatttatcaggcacttaccctgcaccaggcactgggctaggagctttgcaaattgaatactgtgcaaagtattctatgatagcccaagac

SEQ ID NO: 12 - DNA, 51 bp, Homo sapiens
gctgcaggagcctccaacaaagccagactgtgacagggtggaaccccagag

SEQ ID NO: 13 - DNA, 51 bp, Homo sapiens
gctgcaggagcctccaacaaagccaaactgtgacagggtggaaccccagag

SEQ ID NO: 14 - DNA, 345899 bp, Homo sapiens
  misc_feature (151755)..(151755): n is a or g
  misc_feature (152225)..(152225): n is t or c
  misc_feature (162547)..(162547): n is g or a
  misc_feature (162830)..(162830): n is g or a
  misc_feature (163341)..(163341): n is t or g
actcgcagggagctcactcctcggcggtgccgcagccctgtccggactccactgcgcctctgaggggctcaaatacgaattcaaggtaagctgcgcggctttgcgaccggctctgcacttgccctctcacacatgcccgggctatgtcatctgctcgtgttcctagttatctgtgtgcatctgcttttcaagaaaatgtaaaaactgtgctacacatggaaatatgtttaggtggataaataatgcacacctgcatacgtttccataggggccttaaggatgggaccaaaaacgtttggcaggagacggccactctcatgtggtacataccatgtagttcgtgttcctatgttcacatgatgcaggcttcatgcgttacacctaagttctaggtggtttttctggctatgtgtgtctgtgaagcggaactatggagcactgctgatgcgggtagggacagacatcaaatacattacaaaaaaaatggggggttaaaggagtaaaacaaactcactatcaattcatgccgttagagcgctttttttttttttttttgacggtgttagccctggaagcgaggcagccagttaagcggcgtaagctaagagacgcggggttccggtgcggtgccctccggcccggggttacctactccacatgtgggtgtttttcccaagtgcggcttctggggggcggcgcgggcgcgggcggggattcccggactccagccccaccacgttccggagcgtccggccctgttccttaattaccctgcagcatgcgcagcgcggtcggccacagcgccgccgccgtccccgcagtcctccctgcagccaccgccgccgccgccggaacgtcccagtcgcggcgcgaggaagacgcggccccagcctctgccgcctccgctgtcagagtcccgaggccaccgccgagagcgcgccggcgccgcagccacagcggccgagaaccaggaggcggcgccgggcggcccagctagggcgctgcagggtcgcgaggaagtttgttggcccggaaccaagcacgccgtcgggcacgctagctccccgagagcaggcgggcgcgtaagcgaacccccttagaggttacggagggagcgggaagccggcaagagggtgggcagaggagctgggggacaggcgggtgccacaggagcccccgaggagcttcatttgatgagaaggtgaagaggcagaggggaccagcgtgccttgtcagcctcaggggacagtgggctggagagcaaaaagaggagggcccagaatgctgataataagtagttttaatagaacaatccgtgaatagaggcaagagagtgatcatcggccacagcttgagattgggagatggaagagtaagggaaataaattgcgccacctccctcaatccccaattccaagacgactcagtcccatcttctgcttggataagtctgaggaggattaagatgtgaggataatcactctgctgtaggggaatttacatctgcctgttaatggaggagatgaaacaaacgcacaccagtatctattttcaaccaccacccctccccaaaaaggagagaacaccaatgcctccccctctgcccgaatcaaacactgctataattctttaggagactaaagggaaaaaaaaaaaagaaagaaaagagcccctgctcgtatgtggggtcttggcatctccttgtttttgagtggtgggaaacttgcaggaccctctctaagtagagagatctttgatatgggcctgcaaagctgagatatttaggtattccagtggtgaaaaacatgcataaatgccccttcctgaggagggctgacagggtttttgtgtaggaatatctcttcaggatgaaaaagaggagggtgacccccagaggcagaaaatttatgctctctctaggggatagaaagtggagaaagtaactgtcaggtgcttccgttaggttttgtcctacctgagctctctaagtgctaagggacctaaatggggtttcctgggaaaggagggagacagtatggcaaaagagcaggaaagtgaacctgaaactgaaatggacaggactaagaaagagcaaaaaggtgaaagaaacccaaatgtgattattaccacaattgggacatcatctctatatctgaatcattctcatcctagaaaaccatccaaaacagatgggaactgttggtattttccaaaaatggaaaatttccatctactttctggtcctccagtttaatctctcctgctgcaattttagtttattttctccagcaggcagaaatgccaatgtgggtacacagagtcaatggttctagaggcggaagaagatatgaagttagaaaccatggtagtgtgactaagaggcatcacaaatgaaaattcaattgaagtatgaaaaataaactgaaatgcaaggaagtagggctatagatatgctaatatataaccctgaaaagatgctggaaaaaaaaaaaacccagaatgaataggaccagaattgagtcatctgaggcaggccacattgaggatgtacatcttaaacaggcagagaataactagcttagcagaagagatccagcagggagggcattccagccagaagaaattgcatgtgtgaaggcttagaggtaggagcaaacagtcatgtgcctggtaagacagaaaatccaagcggggtgaaatctgagatgagtagagcagatagcacctgccaaggagagattggaaaggactggctaagaagcaataggctttttagggtgttattttgtaagccaataataaaataatcaggtgagcaagttgcatattaaattcgatagaaatatgatgtatgcagagtggactattaggcctctcttatctatgcatacgttatgaagcacaaaggatttctgacctcctctttttaagagaaatcaaaagtaattgtgaaattttaagattattagatcagaaaaccagtagagcccttcaaattgaaaaaaaatgggaaaaaggatgaatttgaaaatacggccatatattatatattaatttaagatgatattggatcattgatatagatatatctgtggaacacaacagagcaagagaattgtaatcagaaaaaaatgtaggtcagttgtgatggttgaaattgagaatggtaccggaaaagttgatggaaacaaatcatagttcagagaagtgagtcggtaaaacagacaagttgatgagaatggagagaataggttaagtgtgctcaaagggaatcccaggtttgagaccctctggaatgtagacactagtttggaagtaacagaagtaataacaaaactgaggaaatgtaatagagttggacatatttcaaagtagtacaaacattaggaactagggagtatgctttctgtggaggcagagagcaacttcaatagtactatttttttgtcccactaagtaactgaaattatgttcactgagctttcttttagtaatttttactctatttctccatcattcttttctttatgcccatcattctacagatgttaagcccatacctgtctatattacttaatggttcccaacctttgatttgtttatttttagtccaagtgtattgccttagactgtatcattctacagattgatcccatgaatacctactaaatgtcaagtttaaagaagacacagataaataaaatacaatctgttttctccaagatgttcaatatagggaagagaaagaatgcaaaggagttatagcagtgcagtataaagtgtgcagaagcataagtgggtattgagctctgttgaatcacaggacagtgagtagtgaactctccctggtatgattctcacagacttcacagaggacatggcatttgagctacacgttgaaggcagactaagtgttttccagatcggagaggattggaaggactttccagtagccaaaaaagcacatgcagaaacctgtgaattgttaataatttgatggcggagagtgtttggaaggaggtagcaggacaggtggttggacagatgagttgaggccccactgtaaaagagccttgagtgcctcactttggagtgggcaatgaagagccaccagaaaactttgagcagggcagttaagtgactaggtctttgttttagaaatagaattcttgagaagtagggaggtggaaataaagggaacaagatggagaaaaggaatccagttaggagtctattgcaattttccagattaggaatggtaaaaacgtgaactaaggcagtttcagcgaggatgagaaagttggtatggattcaaaagacgtttacaaatagatttgatagactttgacagagatttgatatggggtgagggtgaataaattgaagatgattttgaaatttttaacttgagttcctaaattaatgatgatgcctgtaattaaaatgtgtaggtcatgaggtttctgtagaatataatgagggcagaaactttgcctaaattgcaaaagacatctgcaaacttacttcaatttaattactccagccactgataaaactaaggaataatgctagacctagtcgtaaactcttagggatattttgcctgattattggcttgaattttttactctataggcttggctcttcagctggttttctctaatagtttacagactctactatagcttcactaaagacagattctaaagattggtgaaagaacagatgtgtaacacctgttgtttttgcttatttacacaatgtgtcacttcataacagtatgaccagattttcctggtggagttacgtatgtataggcatactggatggtggtcaagaagttttgatttaaaaatcaacctacacagtcacacattatttccctttataataaatgctctgaaaacatgagttctttgagtcatttaacaaattaaatctacttttttgagagttgagatgccatgtacattaaatgtaacaacgtatgtaaagcaaataagtgttctctttctatttcctcctctttctctcttttttcatggttcctttccatattattttctattttggtgttggctttaacactctgaccttttacctaacaccaagtttcaaagatgtacaatgaacactttaaattgttagatggcttaacagtaaaaatgttaatgtttcacaggcagatttgatttggctcactcaaaaactggtgctgagaggctcctgaccatcttatttagcaagtccaccatttttttttttttttttttttttgaaacggagtcttgctctgtcgcccaggctggagtgcagtgctgtgatctttcggctcactgcaacctccgcctcccaggttcaagtgattctcctgcctcagcctcctgagtagctgggactacaggtgcctgtcaccacacctggctaatttttgtatttttggtagagacgggttttcaccatgttggccagacttgtctcgaactcctgacatcaggcaatctgcctgccttggcctcccaaagtgctgggattacaggcgtgagccaccatgcctggctgtacatgttattctttgttttttgtttgtttttttgtttgttttttgtttttcattttaactctttagtgtctctcaaagaaaacatgatgtttgtttacttttgagctctgtgaccagagtggtacaatggactttccctatttggctcactgatttatccccagtgattgttacatagtggaacctcatcctatcaataggtatcaataggctatctagaggccaggtattaataggatatcaatagatatcaatagaatatctattgataggatgaggtttcttaatgcctatgattaatggtaatgagtaatgattaaggtttcttaatgtccctctctattcattttgtgttttctatatacaaataaagattaataagaacttaaaaaaatctatatccttattcaaatatctttggtttcgataggtgccttaatgatttcaagagctagattaagaaagttgaagggacaatggcgttttaaaattcacttacccagctggtacccaaaattattccatatggcaaatgatggtgagaataatggaatggggtaaaggttagggctaggccttcagccacttattatctttttgttgccataagaaatatattacagggacggctgtctgaatgattttaagactttataggctccatcaatgttgtctactcaagactgccagtgctgggcacactcaccattgtgattttggtgctttgtagcactggggaactctggggtctggccagaatcttgatagaaatagctgaaaatttaagagaatgcatgtaggaatgtgatatgtctgtcccacatcctgagagtaaacattatgatatagcagtaaaagcattttagtcaggcagacttggacttgaatcccaggctttgggattattctatgagcgttagtgttttttatgtgtaatatgcggatataatacctgtcttcagtaccaacattaggcctgctctggaccctacattttagaacaccccactatagtcttgctctggatgtgcacccgctctcagagttaggagtttacagagctaaggggacctgcccacctaaaacctgagcttctagaccagtctctgaataatcaagatcctgaaattccctgaaaaaaaaaaacgatccttaatcccccgcagcatctaacagaccctgtcgttgggtccatcttcccagggaaagaccacaggtgtaaacactcctaggcccaaggaatggtcaagagttagctgtttgcaggcattatggacacaactttgacttactggcatatttacatatgcgtgtgtgaggcttttcaagctgcagatggacccaagaaagaaaaaaaatgagggatgaactttggtttaggccagaggccaactcatcccatatcacctgctctgttacattctaacttgacatggactttcaagactttatgaaggtatttgctgaagaaaaatgagaaagcatattattttttatgagtgttattagctttattttaactttcaaatatttaaacatatggtatgcagacctcttgccctgtacccaccctcataataattaacccaatgccttaaagaccccacctcttaatactgtgacattggggattaagtttctaacacaggaaatttgggcaacacattcaaatcatagcaccaatattctccatagccttcttaatatgtactgtgagccatctttggacaagtttgagaaaaaaatttgagggccttaagaaacctcaggatccacatatattagcttgaggttcttcattagccactccattgagaaagcattaaagatctatattatagcttaacttttatctgggaggagcaacacattaaaatctgacaacattggcttggttcatttgtaaatctatcttgataatcacctagctgggacctgtggggacaggaaggaaatgtggcaagttttgatgagcaaggaggttgtggacaaagccaataattgagaaatccagggaaggtaccagagatgtgttcagagcatcaagaagaagcctgagaaccgcaggtgtcagggaatggtgagaggtttctggtcaggaaaaggagaggttcagaaagacacaaggcaaactttgcccttgtcagttttgttgaggtcaacctaccggtgcctccagcaaggtttacaatctgaacaatttgtttttaaaacatatacaaggatttattttgagagcttgatgaaaagtttttcaaatgttcctagctgaatgggctacacttccattttatcaggatctgaataatagaaccctcaaatagcgaacacattttagaaatgtgcagagaggctgggtgtggtggctcacacctgtaatcccagcactttgggaggccaaggcaggcggatcacaaggtcaggagatcgagaccatcctagctaacacggtgaaaccccatctctactaaaaatacaaaaaattagccgggcatggtggtgggtgcctgtagtcccagctacttgggaggctgaggcaggagaatggtgtgaacccaggaggcggagcttgcagtgagccgagatcgcaccactgcactccagcctgggcaacagagcgagactctgtctcaaaaaaaataaaaaaaaaagaagtgtgcaaagagaaataatattcatgataatgacccttgaaagattataagatcttgtaatgccttaagaattatttttaaatattgaattatcactacagattccaaaataagtatatttcactgtatctcaagatttgtaaattggcagtctcttactttttaaaaattcaacaaatatttattgagtctctgattttccaagtactgtgcaaggcacctaggatacagtgatggacaagacagatatagtccctgctctcatggaacttagaattgagtggggagcaataaacatacgtatacagaaaaaataatgtctaagctagagaccaatgtgcttcttggtcaggtaagggcttttgcgcatagtaacatttaaattgaaaactgaaggatgaacacagaatgttccaggatgaggaaataacatacacaaaaaccttgaggttgaaaacagcctggcaatttcatcactggaaagaatggtaccatatgaggctggagatgtggttaggggcctggttatttgggacttctaggctgtagaacagcttttggactacattcaaagtacaatgggaagccattaaaaagcttgaagcaaggaagtgacatgaaccaactctcattttaagaaaagttctctactgctatgtagagaataactgtggtcagaattcagtaatgaatgaattcagtaattaattggaagctgttgaggggtctagaccagggtgatctgaactgggatagtggcagagaaataagagaaataagtggatgtgagatgtgtttggggtaacactgacatgacttgttgatggtttggaagtaggagatggggataaggaagacagaagaatcagtggggtccttgggtttctggtttgatcattttgatgggtagtaattactgagactgggaagagcatgagaagaacaatttgtggttggaaatcaggaatttatctggatgtattaagttatagatatctgtgtgacatctaagagagaattttgaataggcagctggacacacagtctaaagttcagtcaagaggactggatgggagatgtaaattttagattaaccatcttacagataatatttaaagccaagagaatggtgacgtcatctaaggagacattataaagagaggaaaggagggctcacagatcccagtattaagaaatcagatagaagaaaggtctgagaatatttaaaaggaaatctgagagagtgtcagatcagggaggccaataaaagagagtttcaggaaggaaagaattgtcggctattggaggtgccaccaagaattgaagaagggaagagaaacggattcttctttcaagttcctgctgaacttggtgagaggcatttcagtagagtagtagaatggcaattcttcgataactagaacatttagtcaactagccataaatcttattctgcaaatactttggataaatgagatagaagctaagtggctcaaggaagtaattaggagatgtcaaggtcgaattcatatgcttatagctttgtagccctctggttctttgttgttttaacagggaccaaagcttcggtgaacataaatttctaggctgctttgacacttctccattgtccaaatatcaatatcaacctcaagcttaagagacaggtacaactaaatttttccaattattgtttattaatatgtacagcaaacaattataatatcaggtaccttttgaatattgactaagttaaggccctatataatacacatgcattaaataatttattcctagtattatttccaatttgaagatgaataaattagggcttagagaaggtacatagcttttccacaagtagcagagtccagacatgaagccatgattgtcaccactgtgccaaactactaatttgtcaaccaatagaaatcacttttggttaaaaatataaccatggatttctctaaaaataagatcaatatttatgagttccttcctttgaaataaaattaatttctttaacagttaccaactgacttgaaataatagctaggataattttgcaaagtcatatgaggattaggactatatctagatgagagaattcaaaagaaataaggcttaaaaccagctgtttgatatttagaatgacacatacagttttaatattgcaattgccacttctagctattcacccagaaagatctgaaatcttgaattaattttaaaatgctgatcttagggtatttggcacacacagaataccaaagaagatggtggctttagtttttttccagagtgtctactgatagaatttagacactggtataatgaattcttttatatttgactcttgattaaactttgaatgatggcacccaagtgatatgacatttatttgcatatttagacctcttagaatagctattttaataatactgcaattaccaaatacactgagggagccattatattttcacttgcaatttatttccacattagttgcttcactaaaaaaattaatttaaatgatgtttaagttttccattacaggggtcctatttactaaatcttttatttcagtaccaaaggagtagaagtgtacattcagaaagacaattattggaggtaatacattaatattaaatatgatgtcaatggcaggctcaggtgaggtaggcgttgcacgtattcattttttctttataaacataaggcaagattacttttcacatgtgcagtaatcacttcagtaacagtgattattcaatccaataacaacatagttaagtttatagaaaacatgacatcaattaagccaaaatatgtaaaactaatattcagaaggaaaaacagacttgtgaataatataattatattttaataatatgaatcattgtatattatacaatgcaaaaagcataggcaacttaaacaactggattaaaaaaatgggcaaaggaggctgggcatggtggctcatgcctgtaatcccagcactttgggaggccaaggtgggcagatcacgaggtcaggagttcaagaccatcctggccccatctctactaaaaatacaaaaattagctgggcatagtggcaagtgcctgtaatcccagctactcgagagactgaggcaggagaattgcttgaaccaggacctgggaagtggaggttgcagtgagccgagatcgcgccactgcactctagcctgggctacagagcaaaactctgtctccaaaataaataaataaataaaagggcaaagggcaaaggagttgaatagacatgtctccaaagaagatacacaaatgattggtaagcacctgaaaagatgttcaacatcactaatacttagggagatgcaaatcaaatgcacagtgagataccatctgacacccattaggatagtaattatatatatatatatttatttcttttatttatttatttatttttgagatggagtgttgctctgtcacccaggctggagttcagtggcacaatctcagctcactgcaacctccacctcccaggttcaagtgattctcctgcctcagccttccgagtagctgggactacaggtgcccgccaccgtgcctgactaatttttttatatttttagtagagaaggggtttctccatattggccaggatggtctcaatctctttacctcgtgatcgcccgcctcggccttccaaagtgctgggattacaggcatgagccaccacgctcggcctatatatatattttttaaaagacaaaatagcaagcattatctaggatatggagaaattggagcccttgtgcattgttagtaagaatgaaaatcgtgcagctgttatagaaaacagtagtctggtttctcagaaaattaaaaatagaattattgtattgtattgtattgttagcaattttacttctgattctatatacccaaaagaattgaaagcagggactcaaacagatatttgtatatccatgttcatagtagtagtattcacaatagccaaaagatgggagcaacccaaatgtccattgatggatgaacagacaaaatgtggtatatacatacaatgaaatattattcagctttaaaagaggaggaagttctgaaacaatgtacaaaatgatgaacctttaggacatatgttaagtgaaataaagtcatacagatacaaatactgaatgattccacttatatgaagtacctagattagtcaaaatcatagagaaagaaagtagaatgaaggctgcttggagttgggggagaggaaaatgggaaattattttttaatgagcacagagtttcagttttgcaaaatgaaaaaagttctgcagatggcggggatggttgcacagcaatataaatttatttaattccactgaactttgtatttaaaaatggttatgaacataaattttatattgtgtgtatttgaccacaatgtttaaaaataaaaaagtgtcagtttaagtgtagttgcttaaaaaaatttaaaagcagagaaaatttaactgataagaagctgtatcaacatcaataactaactagaaactaatctgaaaatcttttcagagcccttatcatacagattaaggtatatattgagatacaccattgcatatataatcatatttcctgttatatgatgatatatgatgtaacgttgattggttttgctttggtaacattttctggagatgttgaaaggagctgcatacaataaactttattcaaatttttttttttctgttgcagatccgtggccgttcacatggtttcaaggcacaatgagactcactggcccttggaaactttggctttggatgtcaatatttctgcttcctgcttccacttccgtgaccgttagggacaagacaggtatccaggccaactctttgcctaatcaccaaatgttatttatagcctttaagtcattaaaacaaatcttgttaagattgaaaaggccatagattaatgtactataacagaataaattacaattcattgctttcttccattgatcttcccatgatgcacattaggaattcctaaaattacctcatttttttcatacgcatagtatattagtctatgtttcctttcatcttcaatatttacaagtatacatacatgcatgtgtgcctctgtgtgtatatatgacattatgtatctttccctttcctcttcaataattattcaagttataagtatggaaactcattactaattaggattaacaaggacatatctaatcttaattaggaaaaagtgaaaaatcggataggaggtataaaaggaaatgtagtttaattatatgttcattttgtagtatctcagatgaggcaaacaaaaggttgacagatctttagagcaccttttgaactaaatagacaatatttgcaattattaaatgtatcagtcttttcataaatatttccaaaaggcttaagggcaatttgaaatatttaccttcatctctgcttttttaaattgattatgtggttaatttggaagacttttcttgaacattgagtgtgtataagttacttagctaaatgcaattcatattacaaggttgaattaggcacattggagaagccatttgctagggaaagagaaacttcatctctcctatgcaaacgatcacatataatgtattctgatgataatcacatatgattatgtactctgagactgtattattgtgcctattgttttgaatattttttcaataatttttgctaaacaagtataaacccactctagagagacttttgagtttgaggcacacataaaatataattactcataaagatctaacacatcgtagtctttcagagtgttatgtaagtctttatgattttttattatttggcagaaggtgcatttcctaaaataattcacatgaaagtttgaatattctgttattgtacaaaagacatcctgtggctgtcatacaatttgggggggaaactctttcttcagtgagaaattaatcagctgtgactcatggcaactacaactatgtaaaaaaggaaaagagatgttagagcagcggagtttattctgatacgatttctactcttctgaatttgtcttttttgtaaagaaatatagtaggtaatgtgctttgcaatttaatctgatatgacaggacttttttagttagaaggaagaatgaatctttggttgaatagggacagtttttaggcacatgctagtgggtagtaaatgttcttgatgatagcaaggatttgaaggacctaaataaatggttctccaattttaacatgaaaaagaatcacctgacgtatttgattcctgagacctcctatcgcatattcccattttgcaggtcgtactggggtgggatttggtaatttacatctttaacaagctccacagatgaatctaatgcaggattatctgaggaaaactcttagagaaacacttacctttgggataattaacagacattttggttttcttttttcttttcacctggttaccttgcattttatgcaccattttatgccaaggttacctttttttgttattttattttattgtttgcttttagtaactttttaaaattgtgataagaacacttaacatgaagtctgccctcttaacaaatttttaagtgtataacacagtactgttaattataaacacggtactatacagcagatgtctagaacgtaatcatcttgcataactaacacttccccatcttgggattcccctgaatgtttgcttttgtagctctagtatctcaactctttaatcaggttacatgatgtataggactaccaaaatgcatatattctgatccaatttacttcgctgaattaatcttttgaaagattttcccaacaatgtgaattcaaaattaatctgaaccctaacaagattcacttaacatgaagcattaagggaaattaataaaagaaaaaattacgtttgtttttatcatgctatttggtagagggtgttcgtaaagcaacacgtactgaatgtgtgatggaaattgcttaacttcaagtatcatttgcattaattgaaaatgtcagcacagcactatcaaagggattgttgaagaagatgacaagctgggcatggcctggaaggagacccttcttgtgtcttgtgtatctggttcacagcgcaaggttccctttttagtttcctcatgtgcagacctgcgcgtgtggtcactaaccatttaccggagggaagtgattacatctaaaaataaaatataacaaatctgagagagagtctagggtttcagggctggagtctgtgaagttgtcaacagtttactattaaacctaaatatatgacagatagattggaccttttaattgctgtaccttaactctatggtatgttaaatagttacctggaattgtcacagttgggacagaatttaagagtaatatggagagattcaataataacttgaattttaaaattttgaaggtattaggaattcagtcatttcatattctttcgtcaatttgcctattgagatcatgggataagatatatttgtttattttcccactgcaaatgaacttccatttgaatgtggcagtttcagctcagttacttgtcaaaagaaggtggggaagagaattgtgttaaaatatatacaatgctagaaaatctcaaaacttgctttaattagttgcttaaaactctttcctctaatatagactatgtatcaaataattaaagtttcatctactttctttaatctgttctaaggcaaaagtactatatcatcataaaaagcaataagaaacagaaaaccagagtttaaaaaaacaggctaaataaatagaaatgacagaatgctttttaaataacacattttcctttcattatgataaatcttcagtttaagtgtccagattgacttgattataaatttaaatttaggcctgtaactattcatataagcccttctaaggtagttttctattaattacaaggaattacaaggaaaaaaacctattattccaaaatgtggcttttactagttggcaaacacttcacgcttaaactcagagtaaaatgtatgctgttatatagagaattttattttgtgtttttaagaaattcttgtgttcaacattggtaccatgtaaaaatccttcattgacaaatgtactttgtaactcctaaattttgaaagtggaggaaagcttcacaatgattagataaataatgtagcttctaactaggtattttcctttggaagaattggacatttaagcagaggcatgaaggcagtgtgagggcaaggcacgtgaacacctggaaagcagtcacttggtccccaggctctgaggcggcggcatgcttggcatgtggaagaaatagcaagaaaaactgggggactggagccaagtgaatgagggggaggaggtgtgagggtacatgctcctgagaaatgcatctgtgctttctgtgttgtcaaaatctgatttctaagcctgcaaggtcaaaggctagaccttggacactggtaaattcaccaaagcaataaatcctgtcctatgagacctcttggaagatggtcaacctttgccatgtaggacccttcccggatatcaggtggacaggcaggcttctgaatgtatgcccctcattacctcttggtagccttatgtcacagttaattgaatattgtcatattgtattattcataatacattgttattaaagtacagatgtgtggagatatgtgcattttagcaaagttaaaatataagttataacttgaccagacaaattatgttttctttccctgcaatcagcaaactggtgtataagtaatacaagaaccctcactaaactgcaaagagtataacagaactcgtttacatttattttgcacgatgactgtaactttgattttcccatttgtttttgtattacccaaggaatgacctcatcccctggcttttcctaaggccagaagcctctgtgtccagagagcaactagtccattttcagtctgagtattagcagtatacacagatctttcaggtattaaatcagttgaaaaaacaaaacattaaaataacggattttagctgatctgagcttcttagccattcgagaggagaaaaaaggaattcaacatactttcagggaataataataaaaaaaaagtgtaaaagagggatttcaacatacctatgattaatactgtattaaactgaagatttatatgaatgggtatagaaagtatcagacctggccgggctcggtggctcacacctgtaatcccagcactttgggaggccgaggcaggcggattgcctgaggtcaggagttcaagaccagcctggccagcatggtgaaatcctgtgtctactaaaaatataaaaattagctgtgcgtggtggcaggcacctataatcccagctacttgggaggctgaggcaggagaatcacttgaacccaggaggcagaggttgcagtgagccaagacaagatcacgccattgcactccagcctgggcgacagagcaagactttgtctcaaaaaaaaaaaaaaaagtatcagaccaatgagaggaaaaatgtttaacaaaagatgtgatgttatcttaagattagaatgcctagcaatacaataggaggtcaaaccagtaggataaaacagagattaaggggaaaagtgattttctgtgtgtgtgtgtttaagcacatgtttaaaactgagggtgggagcataatgcacttctactaaagaatgaagataatttcttaggtatgctattattttgtttaaaatatgtatttaagaagcaatgttcaatacagagggggaaaagttggttataggacacttgtgttttctttccactctaccattgagtggctggctttgtgatcttaactcctcttggatgactatgttcttaggttctcaggattctaatttttggaaggagaaggggtaaacatcttttttaaagtatgtattttctttgtaggtaatctagataaaataatgatatacccaaatatgatctagctgccttcctttggctcttttctctttttttttttttccagactgagtctcgctctgttgcccaagctggagtgcagtggcgcgatcttggctcactgcaacctccacctctgcctcccaggttcaagcgattctcctgcctcagcctcccaagtggatgggactataggcatgtgccaccacacctggctaattttttgtattttcagtagagatggggtttcaccatgttggtcaggctggtctcgaactcctgacctcaaatgatccacccaccttggcctcccaaagtgctgggattataggcgtgagccaccgcgctgggcccctttggctcttttcagtaccccccaccacctctgtaagttgcccaggtccttcaagccaaatcaggaggaaagtggggctgatagttattaacatcttagtatgaatttgttaaaaacatttgcctttgcttttgaaaaagatctgttaaggttctctaagcagtgcttcttttaaaaaaattataaatatttaaaaaataaattttattgtgtatatttgaggtctatagcatattatgggatggatataattaaatgactactgtagtgaacagaataacacacctatcacctcacgtagttacttatttttgtaatgagtggctaaatcttatttaatgaaaatctcaaatgcaatacaattttattgtattttgttagtccttatgttgcacattccatctctagatacatttatcctacatatctgctattttgtaccctttgaagtgcatttctccatttcctccctacctcacaccagtgataaatattcttttattctctatctctgtgtatttaagctcttttaaaaaatattccacatgtgagatcacacaatattttttttcctgtgtctggcttattttacttagcatactgtccttaaggtctatctatgctgtggaaaatggaaggattttctttttttaaggctgaataatattccattggataaaatgtctaaatgtaatcacaaaaaccgtaaaactcccagaagcgatcatgggggaatagttccccaacattgaccttggcaatcatttttggatatcacatgaaaaatctcaggctacaaaagtggaagtaaataaatgggactaagtcaaactaaaacacttatacacagtgaaggaagcaatcaacaaaatgaaaagacaacctatgggctgggaaaaaataattgcaaactacttatctcatggttaatatacaaaatttataacgtatttttaaaactcaatatcagtaaaacaaataatctgatttaaaaatggacaaaggatcaaaatgcatatttctacaaaaaagagataaaaatgtccaacaggtatatgaaaaagtgatcaacattactaatcataaaggaaatgcaaattaaaccaccatgagacattaccttgtacctataaggatagctattatcaaaagacaagagataacacaaacgtggcaaggatatggagaaaagagaactctagcacactgttggtgggaatgtggattggtatagccattatggaaaacagtatggcggttctgaagaaattaaaaatagaaccaccatatgatccagcaacccctcttttgggtctacatccaaaaaagatgaaatccctaccttgtgaagatatatctgcacccccatattcattgcaacgttattcacaatagctaagacatggaaacaacctaaatgctcatggatggatgaatggaaaaagcagtgcgttttttttttttgtgtggtgaaattttagtcattacttttgctatagtccagagagcctttgaaatgacacggtgctttgcctctgtctacttgacataatatttggatatttgagtcttttctgtagttcttcaaaatacatgcacatttactcaaaagtgctctttactttatattaaagtatgtattttaatacttaaagaaatgaacatatccaccttgtgatagctatttccactgccttgccatttttgtgtaatgaatccataatattcatgtattcagattattgtgccttaaatcttacacctaaataattaacatttagttttattttttttcagcttttcaccacaaagcacgtatgctaaagatatgaaatggcatttgatttttataaaggcttttagtgtagaaagactttaataaatgttgctagaaatgttgaattccattcatttcaaatgataggtttattactttgaaatcatcatatatttgctaagtcctcagaagaatttaaataagatatatactgtttccaacttggcaataagccaaccaaagtgtcataatggaaagcccctttctactatcttgagacttgttttgctaatcacctactggggcttccctacatacattgtgagtaatttaatcttatttattatggttacatagtcactcgtagtcattataaaaatataataagaatggagtttttttgagtttttcaagagtcatttttagcttaaattattttctcacagagatgctattttcctccttttgttgagatattacacacaccaaagttgacaaatcttagtgcacagtgcagtgaatttctatggatatatttatacccctgtgtaactactactcagacctaaatacacattctcaaaacccagaagccttctgtgtacctgctcctagttaacatttcaccaaggtagccactacactgacacagattagttgtataatctctagaatttcgtataaatggaattacacagtatgtattaatgttgcaggacttttccttagttcagctaaagatgagttccttgtcccatggccatgaaaattcaggctcacagacaacttgaatagtgagtaagacagggttttattgggtgaaaaggaaggaaagggggaaacaggaactctcactaggccagagtccctgctagagcacttcccaccaggctgattgaatcccaggttccacacaggaaagaggatgggccaggctcctcccgctaaaaagggtgtgaagttcccaaggctccatctcagtgggcagcctggttggaatttctccaaggaccccctctcacctggctgtctcattcctccctctaaagaagtacatctaattgctcttagattaaggataaggatgaagaccaatcttaacttcttcctgctgacagggtgtgctgttttggggaaatggcaggtggagctccctcagaggcctatctaaggtttcccagcagaaagggccattgtcagaggttccagttgcattaccgtttagagtttgatggcctgaaggcaagaacagacaaagccggttattagaaaacacgtatcaaaatgaaacaaggggagggataaggcagctcaaaaattccaaggccttttaccagtttgcacagggagacggaggccaaacacccaactagcaaaaaaaaactttactcttttgccagcatgttgggcttctgggtttccttccccagagtccaatcctaagccaactagtttaaggtttgggaaattaactctttctagtttgaaggatgcatttaaggggactgtcctctagtacaaagacacaattacctatcagtgaagagaggacagaggagaagaaaggaaaaaaaaaaagagagagcacctgtaatcccatcactttgggaggctgagatgggcagattgcctgagggtcaggagttggagaccagtctggccaacatggtgaaacccatgtatactaaaattacaaaaaaattagccgggcgtggtggcttgtgcctgtaatcccagctactcaggaggctgagtcaggggaattgcttgagttgcagtaagctgagatagcgccactgcactccatcctggtcgacagagtgagactctagctcaaaaaaaaaaaaaaaaaagcagtgttcccattttttcttgtttattcacacttctgtattatttttgttttattcttgtccagtgttactttacctttttttgttaactggtgttctttttcccaacctgatatacttgatattcctttgtcagatgtattggcaaagtaggatgtgtacaggggggctgaggggaactagtaacaaggaaacaaagagcctttatttttttaagaagccttttttaaaaaatgcaaaatgcctaaaggctcttgttttgattcgtttatgaaaggaaaacaaaccagttctgtatctatggtatattgttgctctttatcttccccaactctaaccttgaggaaagaactgccatgagctttgtcactatttgtaaagaaaattatttttcttaacgtatgttggagaagactgctaaatagaacttgtatcagactagacagattttaatcgtgactttacatgcaataatgataataatttcatgtatgataattctgaagatatgaagaaataggaaaaccaaagcaggaaaaatggacaagtgatatgttacaatttctcaggagacaccacttgctcccgttctctttttatctcactcactatgtgatctcatctctcctgtggttttgagaggtgaagccaactggacttcctgggtcaagtggggacttggagaacttttctgtctagctaaaggatgataaatgcaccaatcagcactctgtaaaaatgcactaatctgcgctctatgtctagctaaaggattgtaaacgcaccaatcagcactctgtaaaaatgtaccaatcagcgctgtgtctagctaaaggactgtaaatgcaccaatcagcgctctgtgtctagctaaaggattgtaaatacaccaatcagctatctgtaaaaacgcaccaatcagcgctctgtgtctaaaggattgtaaacacaccaatcagcactctgtaaaatggaccaatcagcactctgtaaaatggaccaatcagcaggatgtgggtggggaaaaataagggaataaaagctggccaccccagccagcagtggcaacctggtggggtccccttccacactgtggaagctttgttcttttactcttcacagtaaatctcgctgctgctcactctttgggtccacaccacctttaagagctgtaacacttgccgcgaaggtccacggcttcattcttgaagtcaacgagaccacaaacccaccagaaggaagaaaccctggacacatcggaaggaacaaactccagacacaccatctttaagagctgtaacactcactgtgaaggtctgcagcttcattcttgaagtcagcgagaccaagaacccactggaaggaaccaactccggacacagttttacataggatttatatgtcagtcactcccaaatgtacttcacagccctcacctctcttttgaattccattcctaactgtctatttgataactccattgtttcaatttcttaatggcatgtcagatttaacacttctaatttctcctctttcccactacagattaacttacgccttgccaagttttcttttatttttctagtgggatttatttcagtcaactaatctccctcctccctacattcaatcccttatcatctcctgttggttcttgtatctctcaattccttcccatgaaattgaagatgttttccattttcagtgtcatctctagtccaagctaccatcatatctggcatcacagagtatggcagtatgactaagtttaccaggtaaaatacagatgcccagttaaatttgaagtttaaacaataaataattttttagtataagtatgttccaaatattgcgtgggacatacttgtactaaaaatatttttatttatctgacattcacatttaactgggaatcctgtattttattagctatgtttggtaattttatatatgtgagggagaagaggttatttattacacagagtggtcagggaaggctgccctccaacctcactgggcaggctggttggagtttctccaaggaccccctcccacctggctgactcattcctccctctaaaaaagtacatctaattgccattacattaaggataaggatgaagactgatctcaacttcttcctgctgacaggggttgctgttttggggaaacggaagtcggagctccttcagaggcctatctaagggttcctagcagaaggggccattgtcagaggctccagttgcatgaccatttggagtttgatggcctgaaggcaagaacagacaaacccatttgttagaaaacacatatcaacatgaaacaaggggagggataaggacagctcaaaaattccaaggccttttaccagtttgcacagggagagggaggccaaacacccagctagcaaaaaaaaaaaaaaaaactttacccttttgctagtatgttgggcttctgggttccttttccctgagcccaatcctaaaccaactagttttaaggtttgggaaattaactctttctagtttgaaggatgcatctgaggggaccttcccatagtacagagacacaattacctatcagtgaagagaggacagatgagaagaaaggaaaataagagggcaccttttaaaggagtcccagggattcaggatgcatttgaaaggggtacagactaaagatgaatggctacccatctagaatgaggggagcaggcatgcctggttttcttctcttcctagcagatacgtggggtacatgagggagagagggaagaatgtcctctttccctcttccatccttgcatccccaagtcacagcgaccttggcagctgccgccatgagtgccaaagtgactttcacccataaaacaggaaggacctagagaataggaattatccactctcacctatgcctctatcctccaaactgtcagtagctttggagttccctacacctcatttatgccatggatattaatgtggccttcatccatgaaacaggaagctaggggttggcttaatcagcaggaatcagccacacatgctcacctgcactgtaccttttaacttccattattgtctgcctctggatccctaagatccatttttctatcctagggctttgaccagaagcttagaattgagtctgggatgaaaatttgtcttgagggagttgcatggactccttatcataagctgaatgctaagttaaaactgtggaactgagtcctcctccaacaagggaggggaaaggatgtcttgtgagacacccagataactggtagctatagttatgcttgctaagatttgggtgcatggtacttggctttggttagctttcttggtcttactttcccaaaaaggaaacctccgagtggtgggtatcctatttatcccaactgcctggcaggatttgcaggataattgctcagaactagaatattgatccagatttctacattacccatcccttttgttctttctgagctgcagctggagactgctggttggttcacaggaacaagcagggttagcctaaaatgtaagcgaaaacttaaaaacaactagtgagtttagaatttaatgacaaatatatgatacgttttgaaacatgatttctctctctccagtcctcatttttattaaaaaacaaatcatcataggactgagtggtttgcaaaatagactttacttttatacttggcctgattatttgcaaaaatacagcaagtataattatttttacataggttttttggattggctttgatggaactctgttccccaaggaatctcagataagatcttttaaagctgagcccagccatgggtttatcctcaaatacctgtaagttgagtgatcctctcctcttaaggtcccataataaacttggagctcctagatctgttagaaagtgacattctttactgaccacaggtcaggaaccctgtacaggaactgtgtagacaagggtatgaggcaactgggcttctatcatccctgcaagttgagattgactccttaaagggaagcatacccttccagtctaagccttggtaaaacaaccactttctccaattgtgtcctgccacaaaagaaaaatggattcttattccactgatgcaaacggctatattaccataagttgaggatactcactgagagtttccaaattctataggaaccaggaagagagaaacaaacgtgctacaaattttgttcataggagtataccttactcaattattaaaggccgtaaaaggttcaaaataaatttcttcgactatgaaaacccaaacaaggatcagcaatattccaaccaaaagtcaaataagttgcttcagctttctgagttcagtccatttagttaactcttgttttgcttgatattcgtgaatgtttcagcttttcatgagtcctgtactattttcctttattccaaaggttacaatttctaaagctatcataaacctatatttcagagcacctgttacagttctatagcttattagaaaccatcttttgaaaaggattaaaataggacaacaattgtctgtgaatagcaaaatgtccagggtaattacagttagaaacacaattgacaaaaaagtttggttatctccctaatggtttacagtaacttaaaatagcaactaaggactaagctctgatttttatcttgcccagattcctttctaaggagtctggggagtcatgccctacaaaccataaattctcatcagatgggttttatttaaccctgtatattgtgacttactttccaatctgactgtggcataacaaggaagaaaattacaatgttttaccccaaagtatatttccttgccataccttgaaattgccctgcaaaatctcttgtgggaaaagtccacattctatagaaaattctttctcctttgttttctttcctttgtttccagatccaagagataatcaactaacagccaggtacccttttaggtctgataaacattttacaactctgcaatctgagagattcctctgcacaataaaacttggtctccacaatcctttatcttagcctgaacattcttttccattgatcccaggtcttcagataaactcaaccaattgtcaaccagaaaatgtttaaatttacctatagtctggaagcaccacccccgccccccactttaagttgtcccacctttctgaaccaaaccaatgtatttcttaaatgtatttgattgatgtctcatgcctctctaaaaatatataaaaccaagctgtacccctaccaccttgggcacatgttctcaagacctcctgagggctgtgtcacaggccacggtcactcatatttggctgagaataaatctctgaaaatattttatggaatttgactcttttcatcgacagtagtttcaattatgtgttataatagtaattcctagcatctttaactttaagataaaacttggtaagttgctttgtgtgctaactgcagccaaggtttgctttcttcattaagggcctggttattccatatgtccccaggccttaatagttgtgaagccagcaagtcaaatagttctcaaaacccaaaaagcagtttgtaaccttaaaacacttagcaaaccttgcatctgatctgcagtttaccaataatctctaaggcttttttaatttctcaaagattaaagtcatgtgaactaaaaggtactacagattttatattccctttaaaaaatatttgatctaagcacttgtctttctttaggccaaattaattagagctcttttgacaggcattaaacacagtacatagacatgcagaagaaaacccagtcgctgggtggggccctttaaaggacaggcctgggaaaacatgcagatatcaaaccagaaagaaacttattccctaaggcaggattgctaaacaaagccttgccaagcagttacaggccatgcccccaggatgtaaaacaagatgaggcttgcagcacaaaccacacagacatgcaaagcacaccagattggccacagcccaagactagccccacaaatcctgtttcacaattaagctttacagaaaaaataaacagtgatggttgggggatctggcctagcaaagggggaaaatatctttaaggcttaactgctgatggagtggagaggaggaaagaaaaaacattttttaatgcttgaggaagaacctcttattcttatacaactgattcctccaccagggagaaaagattaagcttaattactgtccaaaagagttaaacccgttagccagggaagaggaaggctgtggcagcagtctgtggctgggaaccagtcagctggctgtgggggacttttgagccatgcgtcctagcactgcgtagggtgtggggatcggcatggagctgctgctcaccagtctgtcctgaaaaaggaaaaaaaaggccatgaaaagtctcccgaccccaaggagcgacagagggtggtggggtggtttcccataagctcagaagtccaaggacgaaaaggcttagaaagccacagtgagaggttttgtgttctcatttcactcaccacttcttgagctcccacattgaacaccaaaaatgtcgcaggacttttccttagtgcagctaaagatggtgttctttgtcccatggccatgaaaattcaggcttgcagacaatttgaatggtgagtaagacagggttttattgggtgaaaaggaaggaaaggcagaaacagggactctgtctaggccagagtccctgctagagcacttcccgccagactgttcaaatctcatgttccacacaggaagaggaagggccagggtcctccccactgcaaagagtgtgagcttcccaaggctccacctcagtgggcgggctggttggagtttctccagggaccccctcccacttggctgtctcgttaatattttttgggtgaatgacttttttctatttaatattatatctgtgagatttatctagttgttgcatgtatcaatagttcattcttttttatggctatacagtttttcattgtatatgccacaatttaattatcttgctccttcttgttgataaacattttggttgtttctggttttagactattatgtgtaacgctgccattaatattcttgtctaaaagggccatctacacttattttttggtactcctttctcctggttcattgaattttcaagtcatacagttcatatatatttagctttagtaaatactgccaaacagttttctaaagtgtactaatttccattctcataagcaatgtagaagaggttttgttgctccacatcctcatcaacgcttgactgccatgaatattcttgcctaaaagggccattacacccattttggggcactcctttctcttgcttcattgaattttcaagtcatacagttcatatatatttagctttagtaaatactgccaaacaggccgggcgcggtggctcacgcctgtaatcccagcactttgggaggccgaggcgggtggatcatgaggtcaggagatcgagaccatcctggctaacaaggtgaaaccccgtctctactaaaaatacaaaaaattagccgggcgcggtggcgggtgcctgtagtcccagctactctggaggctgaggcaggagaatggcgtgaacccgggaggcggagcttgcagtgagccgagattgcgccactgcagtccgcagtccggcctgggcgacagagcgagactccgtctcaaaaaaaaaaaaaaaaaaaaaaaaaaaatactgccaaacagttttctgaagtgtactaatttccactcctacaagcaatgtagaatagtttttgttgctccatatcctcatcaacacttggcatcttcagtgctttaattttagccatttagtgatatctcactgtggtttcactttgcatttccttgataactaatgatgttgagcaccttctcatatgtgggttgaacatttggatattctcttttttgaagtgtttaaatctttttgcacatttttagaataagattttcaagctttttttgttattgatttctgagagttcattgtatattctagaaatgatactttattgcatatttggactggaggtaacttctcctaatttatggcttgactttttactcttttagtgttgccttttgagtaaagatgttaattttaatgaagttcaacttagcaatctcttcttttgtgattaatggtttctgtgttcttttcaagacatctttgctatcccaagttcatgaagactttgttgtcttgtggatgctttactgttttacctttcatatttatttctatgattatctttagttagtttttgtgcatggtgtgaaataaggttcaacattcagtgtttttctgtatggatattctgttgacccagcaccgtttagtaaaatgaccatccatttcccactgaatcaagtggcctttctgtggtaaataaggagaccatacgttttgggttatgtttgtgtttttccatatgtgtaccaaccccacagtataaaaaaatttatatctgatagtttaaagttctctagcttattcttctttaattttgccttttactattttagcttgttttctgtagtttcatgtaaatttgagaatcagcttgtcagttttacacacacacacacacacacacacacacaccccatactgttgggattttaattggcattgctctgaatctagagataaaaccaagaactaacatcttaacaattttaagtcttgcattctaagcattttgtttatcccttcagttatttaggtctttaatttctctcaggcatgttttatagattttagtgttcagatcttgaatgaggtgcttgggttttataaaagtgactattaatccgaatcattaattggtaatgtttacaaaatctctaataattttactattatttagagcctgcaattgtattaagagttctgagatagcaattttccatattagctaagtaatatctaaaagtactcagtgctataatttcacttactttacaaattgtgttcaaaatgttttttgcagtatatttgcttcttatttttaaatttgattaagtggtagcattatttagaatctgatttattttctggttaaatatattaagatgataccctctcaccatgcctgaggtctgtgatatatttgttaaatgaagggggaactggtgaatcggcaatttcaatttggttttaagtagtttatctcctctctatattaaaaacttcttagttattaaacccaaacatcaattttagacatagagaattaaagttgtgattgcatgatgccaaaatatttaatcaatttagtttaaaatgttaaactaatggtcttaactgtccagttgtacagttatcttggcacaattcaaaaattggctgtaattttgtctgaattaactgaattagcctgattcaatttaaacatgtcctaagacgttgaaaaattggtgtgtgcatatccattactgtattagtgtgtagtggtagtattaaacatgtacattcactgagttgagactatcttttatttctttgaatatcactaagtgctgtagcacataagtacactttctcaatgattttatttctttttttaaaattataggccacttttgtatggtagagatctttgctttttaaattttattttagtaacttccatatatgttgcctttagtttttaaagtttcatatcagccaacaccaaaacttgaattaaagttgtgataaaatatagtagtagttcacttgttttactattgtactttgaatacgaaagtttaacgatgttaaaactagcttatttccaaatgtcaaggatacataaagtgttcaaataatagttataataataatggctaacactaacaagtattcactgtgaaccaagcagtgttcttagcactctacataagtaaccacatgtaaccctcacaaaaacactgaggtggttaatgttcttatcctcattttacagaaatttaataaatggtttaatttatttccattttatcttaagtttctgattgtactgtgtaattaaaattcatacataatgcaaatcctctatgctttttttctttttaaatagaagagtcatgccctatcctgagaatagagggacatcagctgacatatgacaacataaacaaacttgaagtttcaggtaggcaatataatcctttgcaaagtaatattttatgtaaaattatcaccaaatgctagatatggaatacattataggtgaatctttgatactgcaatttaagatcatagcattaacgtgaaaattttaagaattctttttaatttttttttttttttttgagacagggtctcactctgtcactcaggctggagtgcagtggtgtgatctcagcttgctgcaacctccacctcctgggtacgagcaattctcctgcctcagcctcccaagtagctgggactacaggcacatggctattttttgtatttttggtagagatggggttttaccatgttagccaggctggtctcgagctcctggcctcaagtgatccatctgccttggcctcccacagtgctgggattgcaggcgtgagccaccatgcccgacccataaaaatttaaggtagatgatgtagaaaaaattccgaaagcagggttctatatgtttaatctgtgatcaacaatacctcaacctcttggagaaaaaaaaacttatttaaaattataaaagtgtccattgtagaaattttggaagaagaaaaaaaaatttgtgagaaggaagatgtcaccacccagataaagacaagattaccattttggtaatccttgttatctttccttttggtaatctttcttatctttctttctccttcttttcctcctccttctcttctctctctcccacataaatgctaatgagtgtgtgacacacacacagttataattcttatattacatttcatgtgtatgcatttcctgtcatcaatacacatttctttaaagcataattttgtaaaaggctgcttagatttaaactgaatggctgtactatttttaatctaattttctaactttagacatgagagctgctgcaatgagttactctaatttttacttaagataattcctaggtcaaaggaaattaaaattgagtttttttgaaatatattcatgatttttttctagaaaaatggctacacgttctatatgcaaagtgaatttcattctcttttaccctaaaaggagaaaaataaaatcaagaaattttgctgatcccaagcagcaagatttcgtttgaagtgaatcaattaatagataagggcaacacaaaattctgtttagaaattaacatttctattagtttattaaattgaatcatctgttacattttacaggttttgatctaggagacagcttttctctaagacgtgcattttgtgaaagtgataaaacctgtttcaaattgggaagtgcacttcttattagagacactatgtaagtaaaaaattattttctttatgtttaataatacttcataaattattttctaaagagatttcaaataatttgttttaaaaataaagtttctcaatagcatcatcctcactggaatgcagtggtaaacgtgttgttaatgtatttgttgtttataaaaatcattgcaatctaatcttggctctacagtgtaaatatcatttatatgtacagaaaaaggcacgatcattagagaacagtaattaaatccatttctgaagaaatattgtttatgtttaaagtagacataaccaatattaggtttttcaaggtaaacattaaaacataaggcactatatagattcagagccaaaagactgatatttattgtataaatttttagattttctatgcttcttaagttaaaataaaagaatttagctcttaggtgttcatcttatctattgtatagagtacatagtaaataaaaagctgttttgtgcttttatttttggtcttgatactcatttaattttaaaatagatttaccaaagttttcccttactttttctttcttttttctacagatacacttagagttacaaaaaaaaaatcactttccattcaaatagtgacaattggtcagcaaccatacagggcaacaatgatttaccatatagttggcaataattaaaggatgacttcatagtaattcagaaagctgagttatcaggcaggcaggtagcacatatggtcaggataattattcctggagtccaagatgaatattcgcatgtatgaatataccgcaataaaaaccctcaaaattctacttagcttcatatgcaacacaaatgtttttgtgtgaaaatatgtatgtatgttttcccttcctgggcagtagcctaatatttaagacagacaagattgtggagaatctcaaaatttgaattcttaaagggaaatagcattaatcatctcattgcccttgctcagacgttctgtgtaaatgaggttcataacctacactttttccctgagaaaagtttcttttaaacctattttgtgatacttttggtaattttcatttaatgactgaaatggctccttaaaagtaaactgctcaatacttggtaagaaacaagaatattaaggaaggaatttcaaatcaggggatataatgggtggttgttaggtgggacacttcagcagatgtaactgtatggacccacgctacagctgccgctgtttgggtggtctcataagtaggcattaaattctcagggtacagcagttccatgcttaggtatgcataagccataaagaaaagatgagaggcgcaatatttctcacatgtatatatttagatgtttcttaactaggagtagataactttaattaataaatttaagaaaggcaatacattctgtttaaaaattaagatgcattttctctccccatcttctttcggatttaaacccctgtaatgctggccagatggcaaaaggattttggcaaaaggagtgaaaccttttaaaattcattggattacatgtgagaagacttagctaattttacgtagctacactggaaaacttgctgcgacatttagacaatgctatttctttttaaatttatgtgattataaatattaggcaagacttggaatttgttttctgaattttgggttctaaatcactgcccaatccatgggtaatcaatgtaagtgaattctctggttctgtggagcagaacctggtacctccactataggaaaccgggggtatctggttgagctgcccagtgagtatcaagtagcttggctcatttccacttacatttcacttgttgagccaagtatgctaggatgcttctcttgcatgatgccattttgatttttcaatgagactggagtaaagttgtagctatttatatatttgtaaataagctgctttgcagagtcagcatgggaaaaggcagattctattttatatggaaaatggggatgctttctgtgcctgagcttccttttattgttctggcatatcccaggtgaggttcgtgagaggagagacctaatgagtatgttggtctgatacctgttaggcatattcaatgccttgagccttgcttaatgtaaaactcccaaagaccgcttttgcaggggccttccagatagacatctgtcaggtccacaacccaggtactaacaagggtaaatcgtgagtctcaggcaaaatacaagtcaccttttatctctggataacaacgcagtaaccaagagcttctgccctgggcaatagtatcacaccttatcagttgcccatggttcttttgggtcctgtacctgtgctaaagttatagggaagcttatgagaggccacacagacagcatatatgttccctggaggagggtcccttccctggccattcccctaccaacggttaattgtggaggccacactttaaatttccaaggagtaacttggaaattatactgcactctcacgccagggggccacaatagccaaccatctacggtgaggggcttggagggtccatggccaacaccaggtttttttgttattgttcccctacttttaggggtgttggggcaggcaataacagattactgttcatccccgtacctggctggagaaggtcatccttcctgtcatagatctggccacatggcctggccctacatgggtcagtgactaactagctaattctataactttcaggtaatgaaccacaaggtttagccttgataaactgcccagcatcggttcagattaccacaggtgtcacctctttggtgatcactatctacactgccttgagttcaacttattaactactttatctacacctggttttaaaccatatgttgtcagtgttaggctggactgcggcagcaatcaaggcagcagcagtcctctggctagacctatctgtataccatgccccatcaggagtggtgggggtgcctcaggctccatggccttatcttgcattaggcctataggcttcaagacctcttgtaaatctgtgctaagggacttgtactcagcatacttcactgctgcaagtaggggccccacttcgctaaagtggatgtctgcaccttccctatccagggggttgttacccatgaatgtacctaccacactgttgggtacactctgcatgatgactatatcccaatctgccatgcttttatgagcctgaagggcagcatacgcacttactaactgcttcccagtccggggggttgttatccataaatgcacccatcctgctattactaactgcttttctatcaaggaataccagagctcagctcccttccatagctgggaccaaaagcctactgatattctcaggtgctccgtgcactgccataggccctaactgaaactatctgtggtcacatgcacatctagcttaaatgggcacctcttgtcaactacctgtagggcttatgcctgctaattagcctgcttggctaccaggaagactgtctcagcagcatcataccaatcctaggcaaggggagcattgccgcttctaaatctgcaagagaatcagaggttaacataacatcattaataagatcatgacacatggtggggctatgtatatagccccgcagcaacactgtgaaagtccattgtcaacctcccatcaaggcaaactgatggccttctgcctccttgagggctgccatagcagtagtcacttcatgtaggcagtgccccacatatggggtgagaacagcagctagagagccaaaatcactcgggggcactgagcccagcacaagatccctcatgtgggagggaaagcgttcatcatctggcccccaggtattcagatcaaatggtctgctctatacccatcttccagagtatttgcacaaaatgagtatatgatcgccatttactcacagtttctagtatctctccagcatcattccaaacagtccatattgctgccattagccactcgattaatgtgtgttcaccatgcccttgtgccaaccatcggcacagatacagccactgacgaagggaggggtgagttgtgataaaagccagcttttccatctcagaggtggagcaagaaatgctgccagcctccttgtcccaaagacagagtggccaggcagggaggggcactgggtgctgctgacactgttacctaactctcacaactcagtgggtgtataagcactataagaggtgtgttccactactgtggggggttccagggctctccactgggttcccatcagatggtcatgttgtaccttttgacagatcatagggtgagcctgcagtggtggagccccctcctcctcaggatcagaccaaatgggactgtccagcctggaggacaggctcaaggtcaaacttacagctgttgctaactcttgttccaggctgtttatctgggcctccaagtgccctgcttgcacctgaaggtccctcacccccggttctgctacaagctgtgcacttgggtccctaggcacacggcttgtgctgggatgtcccttacctgtggcactgagcatgtatttcacacagtgcagtcagaaatgcccatccaactctgctggtggaggtgcgttccttctcggtgctgcgtgcttccagctgcctcggtgctttctccacactcacaggagacctatccactgcctcccacatttccattggggcccatccaagcagcaccactgacaccaggtaccacagcccatgctgcagccacagagccaacccgggagccttcaggggccaaagacccactcaccttatcctgccaactatgccaattgtcaggtccatgactacgccagatgttatgctggggtcaggttccagctcatgctgagatctgaagggagtgggtgggtgagcagagagctaaaagaacacttggagggctgtaggcaggtgaaaggtagttttattcagcagctctctcaacagcagcttacacacactaggtctctcaaactgttcgctctgtcttggctgcttcatccggtggctcccacacacagctacatggacagctctcccttcagggtcagcagcttaactgtttctctctctgggcatgagtgagctgagccgtgtcctggctccccgctgttcatctgcaaagatggacagctttgactctctgtttctctgggcgcaagtgcacttgtacagtgtcagcagggcaattatacctttcacagacaatagtggcgtagggccaagggatggccttcccatgttatggctacatggttttgataacaagaggagttatacgcctgtgctctaaactcactgagtcactctggatgtttacctcggcctatccttgaccaaagcacagccgtgttccttacaacatcattgtacacttagaggtggcacaggctcaggggatatttgaggggctttatgtgttttgttggctttaaattcatgtccattcttcagtatttatgggatagcaaatggtaagtatttgggggctttagaagattctgggtggcatgctacctagttctctagaattatttgtttagaggaaattttcttggcttcttatatctccaagtatccctagttatttaaaagagataattcattatttgtatacatattgagagctatagcaaagaagattatattttgattattttaaaattgtgttttggcagttatcaggggaaattggtaaaatactgagtaaaaacagataaaaacacacacaaacacacatactatagagtaccttattttcttggcataatgtagtctctatctagcttccattagttgcttcaatagaaaattcaaataaaatgtcttagtattgaatattttagatgaatgttgaatttctacatgctgttggttctgaaggagcaacacactcagcttgactggccgatgaagaaattgatttcaaatgtaccaaggaagtgagttttctgattcattgtttaattcaagtatggtaaagagccttatcccttaggctcttgatagctactggctgtctggaatgctatgttgagaaggattctggagccatagtgggtttaaagtgctgtgacccattaaaaaaaagagggagggaggagtgagcatatgtgttccatatctatagcctctctgaattaggatgatttctgtaagctggtggcttttgcaattgaagcagtgtctaagaatgaggggaaatgaggctacgtgtgaaaaaataacacagattaaatttaatacgatttatgagcttgaataatatagctagacacagtgacataaatgacatatatgatccccttagtatttgttacaaataaataaatctctagtgaaagggagtcttctttatctgtgtctctgtatctctctcattcaattggtgtctactttatgaaagtaaagataatttagtttcatagctttatgtgaaaataagaggtagctggtaggagctattctaaattatgtttatggatttacaaacataataatctttagcaagtaggaaacccaaactacaaatttggaagatgtgtaatgtttttcagaaatatttgaactctggactttaacagttcccttgaaaataatccaaaatatggacaaaactgtcatatgtgttgtaacatgatgtttaccttgtcttttctattgttgaatgatttatcccatgggactaccttttctacacggacctttacactatcttcagattattattattattatttttttttttttttttttttgagacggagtctccaaaaaaacagagtctccagctctgttgcccaggctggagtgcagtggcaccatctcggctcactgcaacctccacctcccggtttcaaacgattctcctgcctcagcctcctgagtagctgggattacaggtgcgtgccaccactcctggctaatttttgtatttttagtagagacagggtttcaccatgtcagccaggctggtctcaaactcctgacctcaggtgatccacccgcctcggccccccaaagtgctgggattacaggcatgagccactgcgcccggctgatttttatcattataaataacactacaacatacaagaaagttgtttttttctgtatttaggattattttcatacaattgacttttagaaataaaattacttgttcatatttagggatcttgatatatactactaattatgttcaatcattgttttctccatgtattctgcatattttccaatatcttctgtagcactaggaattatcatgttaagattttgtgttttatttaacttaaaacttgtgcagttacaaatagaagctgtagtttactgtataattttcacagaagttcctaaaatgtttctgttttgctaaagggtgaataagaggtagcattcggtaagtcactgaaatgaatgcagtctagtctagagcttatccttttactcagcaagcatttgttgagtgtcaccatgggccaggcactttgctaggttctgagcttacattgataaaagaatgtggatctagtctttccttcctggaacctgctagaaagatacacagtgcaaggaaaagctacacttcccccttgctttgccttcatagaaggcaactgagatgtattgccttctattgttcaagcttagactgcatgactcaaatttcaccccttataaaggctaaacttccttaagcatcatgcacaaggctaattttcaatgttttcattccttgcctcttaagggactattttgagggactattttgtaatgcatagttctcctttgagtcctctccaagttctcaaaacaaattcagaggctgaaaacttgttcagaactctgatatcgaagtgtctccttgctgagtgttttagaaggattactttacaattccattaagctctagagaatgcctatttatgcatcccttgggttttcatttggggcattccttcattgtgtagataggaattttcctatataaggataggtgacttagttacaaagttgtccagctgtttttatgagattgtatgactgttatacatgattatgtcatcactgtatttccttcattgcagtttggcataccaagaatctgaggttagtcattaagtcatactttttttaaatggaaagaacatatacaaatatttactactcaatagtcaaaagcacctattttattttttctagaaaattcagaattgttaataggcagcaataaatttcttagtatagaaatagctattaagatgtaatgtaatatgaaatattattagttcagtattgttatttactgattttggaaacatttgatgttatcattatcaaatttaagtaagttgtgattttgctctttcagatttcatataactcagtattgggaaaagtagaacatatcagtaattaatcatatgtgtataaattctacaacattcatatgacttaaagttttttcttggacttgaccattcatttattagccagagagaaataagtttgtttaaaaggtacagaaatgttttaagtttaatgtctatttgtggacattagtagataaaatcttataaaattaaaatatttttgtgtttcacatgagttaaaatggaaaaaccataaatctatttatacatttaagaaactaaagttcctatagtaagaaacaataatgtcactattattgccttcaaagaatgtattcttaacaattaaattacccaaaaaagcctcacataaaatggaatgaaagtgagaagctgcaattcatttacaaacttatccattttctagcctcaaatgtacataaactttctaaggaaaagagggtaggttctcatttctgaggaaaaaaggagtagtttttcacttgtcttgttgaaacacaggacagaacattagtaaagagtttgcagaaagaggtataagatacggttcttgcctctagggagtgtgtgatatctctcctcttaggggcaagaaatgaagacagacttaattataattataattataagcatacagttaatgctttaaatgttcaacggaacaaatataaagacaaaatctcttatatttgggatgataaaaaaatatcttgaagactatgggatttaaactaggctttgaaaactgaagagactactgagagtcagagatgaatcaagttctggggagaagaaagacatctaaggtgagggaaggccctaggaggttaagacatggaaaaatacaataaatataattacatgagataatttctatatgagtaaaacattgacaacccaatttatccatatccaaggtggcaggcagtttgattttctctgatgctcacaaacattacataagcccctggcaaaaattttgaagaactgatatacgattttccccaccacatccagatggcttaagttctaatgaaagtctacggtcattcaaaataggtaataggcctctcatatggtatcatataatcggaaaggtattatttttctttagactccattgctcacatcagaactcccattctttggccaggcaggaaattgttcagatatataagccttacagggtagagattacatccaactgattcatgtttgtgtccctcgtggtacctgacacacagtggtgtttagtgctagttgaattggtatgatcttaagtttaaattgaagggatatttgaaatttattggtacagctacttgcatattttaggcaaccaataatttcttttcaccagcacctcaaaaaataaggcaccttacttctaattcttgtactagatcttttcaccaaagaagacttaagaacaaggcacatgtgactacccagtttccaacaatgataatgattcttataataccaccttacatttatgaatgttatatgatttacaaagtaattttgccttcttgtatcaatggtaccacaatgacttctgtgatgtagtactttatcaccattttatagatgaaaaatgaggttgaatgacattaaggaattcacctaaaatttcaaaaataataaacagttgtgtctagaactcagttcttctgtctccaaatccagaattaatttctactttattatgactaattacatgtaaattatcttgttatgtctatatgccatttactttgatagtagtgaggtactagctaaatgtactacttaggagtcataataaagcaaatgttctcataaagtaatgaaactaaagtgttctattttgataattacttgggccagtctaataggcattgattaatctacctctattgttggattatatattagatttttttctttttccagtcattcttttatcctatgaatcaatcttgtaagggacagcagagcttttcgcctggtagggttgtgtgaatgtatctgtgcagtgtacactgcagattttcagagtgtacaaaagaaaggcatgtaagcatgtacttcagtcttatctttaatcttaatttggctcataaaaatgctatttgaggactaattagttattatccttaggtggttgcaaatgcgttgatttataatggttgtaaacctacaaataagcatggtcttaaatttatgaattagagaattgacctttaatagtgcttgatgctttgttatactagtgcttcagcatagctttataacaactctaaagatttttctgtaggctgattggactctgtgtatcacaaaatagcatcaaatagtctaatcctccttctcagacacagtcagactgtaggatataattataatttcaataataaactttgaaatctatgtcaaccaaggaagaataattgtgccaactgataaatcattactttattgtcatttcaattctttcaacttagccacaaatgctaattagaaaataaacatggtagcagaaaaactatgcttatgttattttatgtgattcctgtaagtttcctacatcttgttcattatctcatttaggtcagcacttatgtttcctaagacacttttttttcccccaaattaggtgacattttaataattttagactaaagtaataaaatattcaaataattgacttgattaattcctttcaccctggctatatctaagtaatttggaaacatcataagttcagtgaaaatgttaatatgaacacatgtggtgatgccatgcagaattaacatctggctggttgaatttgagactgagttgaccagatgttttgtgttcaagttatttttcttatttgaacaatctcaacttcttctctctacttcataatttcttaatttcagctgttctccctggaggcaaccccccttctttcaaaggttaaccccttcacttgtgctcttaatcctctcctagccagcctcctctaagaccttgatccacccatgatccccctgctcttgggtcttcagtgctcctctccacagtatcctggcctcttactctacaaatatatacttaatccttccctattacagaaacattttccctgggcagtcccctttactcacagacttcttaaaggaacaatgttactgtccacttttacttcttcacacatcccttagcccattaaaatctgactaggacttcttgaacactatggaaatttctgcctcatagttgccggtgacagctgtcctaattccaatgccagcgttgacctaggtgttgcactaaacttcctttgttaacccatttctgtctctctctgtcataccatgcccaccttttctgcccattggaatcctacatatcctagaaagcttagtacacatgctacattctacactaagccctcactaatgtccttcaagtttccttctttttttggtggtccaataccactttttccataattcttacataattctgatctcattctgacttgtgtaatctaaatgttctcaggcctcgttaatatgtggatttaaatgatattatattaacatcaatgcgtaaattgatattacttctactttctacatacatcactgcttaaaacctactgttgttatttctgggagcccgaaaagtgatgcacatgtgttcatgttcaaaagcagatatgcttttcttcttgttttctaattttcttatcaatgcgtgttgctattgccattgctgggagctctctccatgcaaatgctactctgtgagacccaaccaacctctgctcatggctgctcattcttggcccacaggtgccagaattaccctgtggcttatgactgtgtgaggtgtgcatgtgtgctttggaaggtggtggcagagatctaaagaccccttctctaactgtcccctgggccctgaggcagtgtatcttgggcacagagcctcacagagtgtttaataaatatagtcctatcaactcctggctcaccatcatttgtgagtctcaaaagccagtagaggccaggcacggtggctcacaccagtaatcctagcactttgggaggccaaggcaggcagatcgcttgagcccaggagttcgagatcagcttgagtaacatagcaaaaccctgtctctacaaaatacaaaaaagttagccaggtatggtggtgtatgcctgtagtcatagctactcaggagcctcaggtgggaggattgcttgagcccagggaggttgaggctgcagtgagccctgatcatgccactacactccagcctgagtgacagagtgagaccctgtctcaaaaaattaaaaaataaaaagtatgaatacgaggcaattctctctgttatcctcaagtttgcctctctcttctgatttacccacaataagaatgtaaagtttcttttggttaagagggctatattgagaaaaaatattttatgttatattgtcattattatttctaccttcagctttgatgccagtgaaagaataaatactaacaaagtatttcattcaattcccaaatgatagtaaatattatatgctaaaccctgagaatttaagggtgaatagaaacagtcccctccattgaattatttctgtttggaaggacaggccaaaaataagctgttatggcatataatagcaatttttagatatatgtatgataaactctgagagaacagatgaagccaggaaaagcttcatagaggaagtgaaaagttgagccttgaagtgtgaatttaccaggtgagccaaggggtcaatgtatgttgtggtagttagagggagcatcatggtagttttaaaggtcaaagcaatttgaggaatagtgagaaatcccatgtggttaatgaacacaggtgagaagaatgtctggaggtagagaagacttgaaagtgtgggctgttctgaaaggtcttacttgctggcatgaggggtttgaactttattcatattttaaaaaaaagtggaggtgtagtagcaatagcactacatgctagaaaaaaacagctgagcgcatatgccattgggaaaatctcagctttcaattaggtctaggacctcccaggctgatcctaaagcaacagttgagctctcggacccaaggatacttcagaatttagaggaccttttgcgggcagggttgggtttaatccagggttaaaaaaaaaaaaaccctttcctggctgagggacaccagaaaaaactaaccttcaatgtatcctcatttctaaagagcagactgtctaatttatccttggtttttgttatctggatggcatccagtagggggacttgttttcaatgggaagtcgtttacaatgccacattgaactagtgctaatcagatcaggcgtgagattgttagagggtcatccaagctttgttttcccattaacaacctatctgcctgaatcccctcagcaaacacaaaagggctaagatttcagagtctctgtggctgtggaactccaacatcatcaaccagcctgggaggaaggcatttcagacaaaccctctaggccctgctagccaaattgcttgtaactgacaggtgatggtgggtgtcagctgggaaagaaatgacttactataaactccaagcatctctcacttcactctcaggaaatgtaacttgtatcatatttctcttcctggaagatattcagcaagtcagaggcctcactgatacttgtaaatacggaagttcttcctaaaccctgcctcacacttactcggaatggcagaattaatttggaagccagttcttgatatttaaaaatcgatttttttccatttagccatttaattttataagcaaaattaaataaataaagcttggtcttgttaaacaaataaataaagcttagtcttttaaatatgatctggaaaattcactctagctctatcaaaatagcactttgctttcaaggcttatgctttgagctggttgaagaattacctccggaaccactgtaatcagtaattaaactttttaaacactttgctatgtgaatgtatctcacactcaatttttagaacatcatttatgaaatgaaatttctctagaataacaatgtcatcttgcttttcagttcatgagcactgaaattataaaagtttcttcatcttttttttatattttagttcttgtctcacattccttattatttatttaagcaaaagatcaaacaggaaactggtaatcatgaattttcttcctaatcctttcttgttctgtagcttggtttatcctttcctttttgtatatttgaaaccgaactgttactacacagagacgtaaccatattacaaactgtggttcttttaggaacactgaacaaaaacatcaaatttggacttgctatacaatgaaattgctaattacttaatatactaataagtaaacaaatttatgagcttcattattgtctttaagtttcttgacaacaacccaccagggcctagtcatggagaacaaatgcaacctactgtctgcttctatctccccataaaacaactgtcaataaatatgagcatgtactttaaaatagtgaattaattttaaaattttctgcttttccccaactttgtcatacttacaatgctaaccattggaagggagtctgaaaagcaaagtttatcctcttaaggcagtttttattggcttctcattaattggacagccgggaatgctcattatttgttcagttgataccctctgttgctgggagaccagatacttcaccttcattaagttaactttgtagataacaatggcaggccctgatttcacaattcagggaatgaatagaatgaaagtttactgtgtgccaggaaaaccataatgtaggattggtgcaaaagtttctctttctttccatcatcatttgagatagtcacatgatcattattttcacgtttgaataaattacttatcttttagttacgttaccattctactgttgttcttcccaaagtatgaaaatcccaatgtattacttttcattaggaaaataaatacagaggtactatttatcagaacacgttttacctttcttcacattacctagttactagtatacatactgttctcatgattttcactactacttcctgaaaattacactcatctcatctttttttttttttttttttttttagacagagtcttgctgtcgcccaggctggagtgcagtggcgcgatctcagctcactgcaagctctgcctcccaggttcacgccattctcctgcctcagcctcccaagtagctgggactacaggcatctgccaccatgcctggctaattttttgtattattagtagagatggggtttcaccgtgttagccaggatggtcttgatctcctgaccttgtgatctgcccgcctcggcctcccaaagtgcagggattacaggcgggagccaccgcgcccagctttaaattacactcatctttaaggaaatgcttggtgaaccatggcacatgtttacctatgtaacaaaactgtgcatgctgcacatgtaccccaggacttaaaataaaaatgaaaattaaaaagaaaagaaatgtttggtgaaaacttctaagttttctagaaaatgatctaaggaattagagagaaaatattcctgattttttttcatcttgtttagcatggctatcttttccaaaatccaataggcagtaatttctattttgaagtcataactgtgtgttttgtgatacttcctgatctatgctcaaaatatcattagaggaaggaactataataatttacctttcagggctactagccacgtaggatgtgcaaatgtcagaataaatactttgcttggagcccaaaatatgattcattgttgttgttaatattatagtgtgattgtaaacattttatttattcatttcttgaaattaatatatttacttatatccctccttaatacttatgaaaatagagacatttttcccctcatagtgccaaaatattacttttaagtcaggttggtaatgatgaggggaattttattcttaaccaaaaaagaaagctcaaaaagatacaagcaacttgatacattggaagaaactaaccttggaattaaaagtcataagttcaagttccaacctgacctctggcagagtaaaggtgaggtagttatttaacgtctgcagctttaatttctcatttatgaagtgagatgattgatctaaattactatcaaagtccctttcagctttaggagtatagaactacaggaaactatgatgtgtggtttcttatgaccaacacatttccaaggacttgaagacttctatgaagacacttttggtgaaatattggagcagctattatattttgcttcagcctgtagagattttaaacttctttttgaaattaagaaactgatgtgtttgttaaggacttctttttctatcaaagtttttgattaacctgctttagaatcacataggatttgacttttccatctgttgttttcctgatgaatgtgatatagcacagtctcataaggcctccacgttaaggccttatgcaagataacatagattttatgctgagcaacgtaagtgttaagcacttactaggactggttataggcatcattgtggattttcatgaatggaacaaatctttatggatgcttcctatatgcaaggtactagtctagatgcttgatttacagccacaagtcttacaggaccctgtttttgtggaaatcacattccacaaaacgggcaataaatatgtaaaccaataattcttaaaaagtcaggtaggcacaaacctatgaagaaaacagaacaaggtaatgtgttagatggtgactagggtgaggacaatcttagaccgttcaagggaagtgatatttgagctgagacctgaacagtaaggaaaagccatctaaatcaagggtgtcgaatcttttggcttccctgagccactttggaagaagaagaattgtcttggaccacacatgaaatatactaacagtaatgatagctgatgagctaaaaaaaaatcacaaaaaaatctcataatgttttaagaaagtttacaactttgtgtttgggctgcttcaaagccatcctgagctgcatgtggccagtgggcggtgagttgagtaatcttgatgtaaatgaagacctctgggaaagactgtcccaggagaggaaacaggaagtacaaaggcccaaggtctcaatgagcctagtgtgttcaaggaacaaaactcaagtcattgtgcctggagcctgggtgccacacagagactggaataggagatgatgtgtcagaggaaggcaggagtcagatcacatcataccttatgagtcatggtcagagaaatgcatcttattctaggaaccatgcaacacttttagaaggttataagtaagggagggacctggtctgattttaaaagctcattctagctgctatgtgcaggccagactgtaaggaaaggcaaagaaggaggacaatcaggacactataacaggagtcctggggagagatggtggccgcttgggatagcatggtgatagtggagatggagagaagtagccagagtcaagatctgttttggtgataaaaacagtaagggcttggggtggtggctcatgcctgtaatcccagaacttggggaggccaatgcagatgtatcgcttgaggccaggagtttgagacccgcctaggaaacatggcgaaattccatctctacaaaaaaataaaaaatacaaaaaattagccaggtatggctgcacgtgcctatggtcccagctacataggaggctgaagtgggaggatcacttgagcctgggaggttgaggctgcaatgaaccatgaccacacctctgcactcctgcctgggtgacagagtgagaccctgccgcaaaaaaataaacccataaaataaaacacaaaaaccagtaagacttgctgatgggttagataggatgggggataataaaggaaaggcaggaaaaaataataacttgcagggatttgggtggggcacctgagtgaatagccatgtcttttattgagatgtggaatccttgtggagggatgttctgacgcagcaatataaaacgttcaatttcagttatttaattacaatgcctttcccctccacgtggagatgcctactaaggacttaggtatgtaagtccagagcacaggagagagaaatagacaaggtttatcttggttgcatctcacatcccctcctttttggaactttcctcccaaactcccactgccttaaggtgacacatttgctgcccaagactcagcatctcatctctgtctgtctaactcaggagagcttccttctctggatttgttctctctctgtgtcttccctcttagaactttgcttcatagcagtccccacagatctctgctctgtgctttccaaggtgagaattaattattacatagtttgttagtaatgtgtgaccgactttttgggactatcttaatattaacagagcttgtgttttataaacacgaggattttccagacaggaagaaagctctaaaagtagataattaggtgttttggcttgttaatgaaagcacttcatagttaggaagaatgttgaatgtacaatctatttaataacaattatacaaatatagagtgatcaaatgcttcctctatctcatgccaagatcttttctgtaatacagaaaacttttaggttttattctgtttgtatttcctaatggttttaagtaaattttgaccagaaaaaaaattttcattaatcagataggaaaaaatctagagaatgaagttaatatggaatttggacaaatataattcattcttaaagtcctatacagtggaattgcttcagagttaataaaatgttattttttatccaactccatgtatattactactagtaactttgtaattagatattccattttaagtaaatgggtgaaatattgtcataggtatgtttttatttgaaagttttttgttttgctttttctcctaatgcttcagtgatttacttattataaaggctataggttgggagttctagacttttgcaacttaatttttacctaccaaaatagaaaaaataatatttgttagtgcccttttaggtgtgtgagggggtgcagtatgtgccaattctccctcatctctgtccttgaagaatatagggataatttataggtcacatcagaggttagggttatttttcccaagatgggaatagttgtaatttttaaaaacctgatcatcagcacaattcatgccccttgcaaaaactgagaaagtagagaaaatataaagaaaaaaataaaaatctttcttaatcttaacaccaagaaagaaacattttaatgttaagatttttatgaaataaatgttttattagggtcaaagcctcactggcagtggttctgacacctggacactgcttgtactatagttagtcatttttaaggagcgctatttctgatcccctggtcacttccccgaagtttcatatggttttcttccattttatgattaaacagggggctgctgtacatagagaatgtcagagagcagatgcaagctacattttatatttctgcaacattgaagtgaattacaagtttaaaggaatccaagatatatgaattacaaggcttcagagatactccagattacatctagagctggctccctccctcagaggccagtgtgaagtggactcccaggcagcaattttcccttgacatgcctggagcacttcgaccaactttagtttgactgtatgatgtttagttagccatattttgaaaatattgattttatattgaacattttgttaatctgatatacttgtgccctcataggcccatgaatatctagatgaccttaattaatgtgtagaaaagtagacaatttaaaaaaaggataaattacacttaaatttcactgagtctaggctcttcaaatgtaggttagtattaatttatgtggataaaatttttatttatgacattgaactacatacaacatgtataaaatggagggaaggcaggaaacatcccattgagaatttctagtcatatatatatattcatctatatattcatatgtatattcatatgtatattcatatatatattcatatgtatattcatatgtatattcatatatatattcatatatatatcatatatattcatatatatattcatatatatcatatatattcatagacatatcatatatattcatagacatatcatatatattcatagacatatcatatattcatatacatatatatcacatatgtatcacatatatatcacatatgtatcacgtatatattcatatacgtatcacatatattcatatatatatcacatatattcatatataatatatccatatgtattatatatccatatatgtcatatatcatatcatatatcatatatatcatatatcatatatcatatatatcatatatcatatatcatataatcatatatcatatatctatatatatcatatatcataatcatatatatcatatatatcatatatatcatatatatcatatatcatatatatcatatatcatatatatcatatatatcatatatatcatatatcatatatatcatatatattcatatattcatatatattcatatatattcatatatattcatatgtatattcatatatattcatgtatattcatatatattcatatatatattcgtatatattcatatatattcgcacatagattcgtatatgtatatagattcgtatacgtatatagattcgtatatattcgtatatagattcgtatatattcgtatgtagattcgtatatattcgtatgtagattcgtatatattcgtatgtagattcgtatatattcgtatgtagattcgtatatgtatattcgtatgtagattcgtatatgtatattcgtatgtagattcgtatatgtatattcgtatgtagattcgtatatatattcgtatgtagattcgtatatatatttatatgaatgaacttagcaagtaaggatcagcgatatttttcttactgggagtatcactgaataagcaatggataggatttcttataggaaattacactccattcaaaatattcaagcatggatatcttagacatagcaagctgtcattatatctctctggtaacccaatatggcctcttttataacagaaattttggcaagacccagagaaactattctgtgtcacgttaagtgtttgtgcttgtgtggtataaacaacaagcatagtttgtaagagtagatttttttttaatattttatttttaaaatgcagaagtttttcttcaaatagcataatcttggcaagcaaaatcatatttggtcttgaaagcacaatataaatttctgaaagggaaatatagtaattataaagattttcattcattataaacttagattaaaatcaattattccttaaatatagctaaatttatttcaatgtatattttaaaatataattgttatatataaatattgataatactcttatttttttgtcacagcagaaactactcatgagatgcaaaaatattttcagcttttgaactagattataaattatcgaaaaataattctatttaggtttttttttttttttttttttgatatggagtcttactctgtcacccaggctggaatgcagtggtgcaatctcggctcactgcaaccttcacctcctgggttcaaacaattctcctgcctcagccaactgagtagctgggattacaggcgcgtgccaccatgcctgactaatttttgtatttttagtagaaatggggtttcactatgttggccaggcaggtctcaaactcctgacctcaagtgatctgcccgcctcggcctcccaaagtgctggaattactggtgtgagccaccacacccgacctctatttagtttttgtttattaaacatcaaagtatcatatcaaaattcagtacatctctgtctttcatttgctggatcactcactcattcaacagataaagtgccctgttgggactgcacttaggctttgtgagtgatacaaagtatgttaaatgctgtgcttgctttcaaagagctttcagtcttaacaacagatggactggtgactgcatgactatcatcctaagtagaaaatgaagagaaaaaatgtttttattatcttttgctttgtaagaaaccactacaaaacttagtggctaaaaataacaatttgttatttctgaaggatttcagaaaacctactcctcaaaaaaagcaataagaacacaggcaaaatttgtcaaaatcaatatattcagaactttttaaggggctttcacaatctaatgagtgattattcaagaaaaactttgaatctcagtaagactagcaggctttatggcattttaacttgtcctattcatatccctctctctccaacacatggtaggcttgaaaaccagtagcttcagaatcacagtgaaaactagctgcctagcagctgctggaaagggaagaaagagtgtgaagttcattaaaagctccattttcagggaattgccattatttttcctgcctggtagttccctaaaaaccccaattcttagttggtctttatttgacctgatcagagcttgtaagaatagccctttcctgtggacattaattgaaaataatcagtggcaattgtttaatattgcagctgcctgaggcaggagttataactggaataaacaagaagctgatcaaaaaaatttttaaagaaaaaactggggaagaagacatccatagagggcactagaaagctccaacatatttgtaggactccagacacatatttctatgttacagggctgtgtgaaaactccggaaaggcctgaaaaggccttaaaatctttggcaaaactccaagctctgaacaagcagaacatgaaggctaaggtgatttataaactaccagcctgaacatttaaggtattttctgtcacacacataggccttcagcaaaggctgggatgcttttgggtaagggtgtttaactattcaatcattagttgactactaagctaaatgagcagaaacttcaggagtcaaacactttacagaatttgtccagaaaagtgactaagcaaataaaaagcagcaacaataaagacaacagacagcaccaacggcaaaccattgacaggtagagtctaatttccaatgttaccatattatattattttaaatgtcttcttttctttcttcttttaaattatactttaagttctagggtacatgtgcacaatgtgcaggtttgttacatatgtatacatgtgccatgttggtgagctgcacccattaactcgtcatttacattaggtacatctcctaatgctatccctcccccttccccccaccccatgacaggccccggtgtgtgatgttctccttcctgtgtccaagtgttctcattgttcaattcccgcctatgagtgagaatatgcagtgtttggttttttgttcttgtgatagtttgctgaaaatggtggtttccagcttcatccatgtccctacaaaggacatgaactcgtcattttttatggctgcatagtattccatggtgtatatgtgccacattttcttaatccagtctatcattgatggacacgtgggttggttccaagtctttgctattgtgaatagtgccgcaataaacatatgtgtgcatgtgactttatagcagaatgatttataatcctttgggtatatctgggtcaaatggtatttctagttctagatccctgaggaatcgccacactctcttccacaatggttgaactagttcacagtcccaccaacagtgtaaaagtgttcctatttctccacatcctctccagcacctgttgtttcctgactttttaatgattgccattctaactggtgtgagatggtatctcattgtggttttgatttgcatttctctgatggccagtgatgatgagcattttttcatgtgtctgttggccgcataaatgtcttcttttgagaagtgtctgttcacatcctttgcccactttttgatggggttgtttgctttttcttgtaaatttgtttgagttctttgtagattctggatattagccctttgttagatgagtagattgcaaaaattttctctgattctgtaggttgcctgttcactctgatggtagtttcttttgctgtgcagaagttctttagtttaattagatcccatttgtcaattttggcttttgttgccattgcttttggtgttttagacatgaagtctttgcccaagcctatgtcctgaatggtattgcctaggtttttttctagggtttttatggtttgaggtctaacatttaagtctttaatccatcttgaattaatttttgtataaggtgtaaggaagggatccagtttcagctttctacatatggcaagccagtattcccagcaccatttgttaaatagggtatcctttccccattgcttgtttttgtcaggtttctcaaagatcagatgtttgtagatgtgtggtattatttctgagggctctgttctgttccattggtctatatctctgttttgataccagtaccatgctgttttggttactgtagccttgtagtatagtttgaagtcaggtagtgtgatgcctccagcttttttcttttggcttaggattgacttggcaatgcgggctcttttttggttccatatgaactttaaagtagttttttccaattctgtgaagaaagtcattggtagcttgataaggatggcattgaatctataaattatcttgggcagtatggccattttcatgatattggttcttcctatccatgggcatggaatgttcttccatttgtttgtatcctcttttatttcattgagcagtggtttgtagttctccttgaagaggtccttcacatcccttgtaagttggatttctaggtattttattctctttgaagtaattgcaaatgggagttcactcatgatttggctctctgtttgtttgttattggtgtataagaatgcttgtgatttttgcacattgattttgtatcctgagactttgctgaagttgcttatcagctgaaggagattttgggctgagacgatggggttttctaaatatacaatcatgtcatctgcaaacagggacaatttgacttcctcttttcctaattgaataccctttatttctttctcctgcatgattgccctggccagaacttccaacactatgttgaataggagtggtgagagagggcatccctgtcttgtgccagttttcaaagggaatgcctccagtttttgccccttcagtattttattggctgtggtcttttcaattaacaattagaagatatgcaaaaagaaggtatgcaaaactatgtacagataaaagagtggccaatagaaactgtttctgaggaaacctagacattaaacttacttaacaataactttgtctgctattttaaatatacttaagtaactaaaggaaactgtaatgaactaaagaaaagtatgagaatgatgtcttaccaaatagagaatatcaataagtagaaattattaagaagcagcaaatcaaatttttgaatagaaaagtataaaacagaaatgaaaaatttacaggaggggttcaagaactgatctgaggtaggagaagaaagaatccaggaacttgaagatagttcaattagtctgcagatcgggggaaaaagaatgaagaaaaatgaacagttccaagactgtgtgataccagcaagcatgcataataggaattctaggagtggagagagagtaaagaaagactatttgaagaaataagcaatgcaaattcctcaaatttggtaaaaggtattaacttatacattcaggaagctcaacagactctaagaaggacaaactgaaagagatccacacttagtcacatgataaccaaactgccaaaagtcaaagagagaatttttacagcagcaagagagaagtagttaaccaaaacagaaaacaagaagttctcaatatgagtaagctgacttctcatcagaaaccatggagaccagaaggcagtgggatgacatagtcaacgttttgaaggaaaaagactgtaaatcaagaattctatatccagcaaaactatccttcaaaactgaaggtgaaattaaggattaaaaaaacccagaatttgagactagcacatctgccctataagaaataggaaggaaattcctttaggctgaatgaaaggaaactagacagtaactcaaatccaaacaatgacataaaaagcactggaatagttaattacatagataaatataaaagccagaataaatgtacttagtttgtgtttcttttattttcttatcagatttaaaatacagttgtataaatacatacatacataaagcaatattagaaatcttcattgatgggaatataaaatataaagatgtgatttatttgtatgacaatagcacaaagcaagaaaaagctaacaggtatatagaagcaaagtgaaaaataaagctaaaatatccatgttatatttagcatggtcttcagttgggactaagaaatcagtattaggaactcatttgcaagaatttaatatgaaaaagtttctttggaaaatatttgtttacttattactggtgttctttaaaattctctgtacctctctctactaacaaaatcaagtcataccattttatttccttgataaatctctactgtttgtcagactgcagtgaattctgagattttcttctgttcaatatcttgttgaataaggaaatgtcacaatttaatactgtaatctcttcactcatttttatacactccaaactttaacaacactgtaccagaagattttttaaaaggaaagagaaaagtgcataagttacacatttactgagaaaaatatgactgagatattgtgttacacagaactttatacctagattttattttcttgcaatctccagtttccccacaaaagttctttgttttcctcccacagtaagatatttcccaaaggccttcctgaggagtactcagtagctgccatgtttcgagtacgaagaaacgccaaaaaggaacggtggtttctgtggcaggttttaaaccagcagaatattccacaggtaaagtaccattagagttgtgctcattagttttccttgtgtaattaagccaggtgaattatttgaactggtgcacaaatttgcgagtagatctagtatccaaatgttctatcctttagagggatcatcaacaagaaaatgcaagtattctcgtagttaggatggccttgctgagatccataatatgagagtatagtggtaaacatagtgttagtttttgtttttattttacttctaggtccatattttgtttaaagatgtaaaactgccttctctttacaactgcttcattaactaattctttctaagtaacacattcttcatcttccttctgtcgtctctaatgttatatattatttttaaagcagtttatcatttcattggacaactcttggtgaataaagagttgagacttaaatatttatcccatcaataaaaatttatggaacacatactatatactaggtagtgacaagaaaagagatctgaaaaacagaatttgtattatcagggagcataaggcgtaaggagatgacatctaggagaacaacataatatagcataattatgttgaacaagtgcagtggtagagttaagcttagtgttgggtgtggacaatgggagcaccgaaagggcagctcatcggaattgggggatggagagagcaggaatctaggagagcatatagaagagatggcgtttgggctgcaaagaaggaatgctggcactccagcgaggggagaggaacctcaaaattacttgttggcaccatacattagtttttacttgtgtacatatccgttgaaatgttttaaatcatcactgatcttttaatctgttaatacagctacaattttatgatgagtagatcaaccaagagtatgtcctctataaaatgtgttttctctgtaccttgcaaagtatcaatggtgaaagaattgatcttagcttccctacttagggaaatgatcacattcttagtcttcttaaattggtaaccttaaattcctgtgttactaatacagagcaataatttatatatcttataaaattttatctatagtgtatataaattatgtatatataaacttataaatggtttatataaacatttaaaataactacacacacacacacacacacacacactcttagatgttctcttaggaaggagcatattacattcaccagaatgccccatttctaaaccatttttgtagtggtgtttgctgttcttttattttaacaaacctggtggacacaagtgtcatctaaaatattttactaagtgcctcagttatactaatatgcatcttgagcttttctttgtgtgctttaataattttgaacattgatttttaaaacatttaaagatactttacatttttgcagatttctatagtagttgatggtggaaagaaggtggtggaatttatgtttcaagccacagagggagatgtgttgaactacatttttagaaatcgagaactccgtcctttgtttgatcgtcagtggcacaaacttggcattagtatacaatcccaggtcatttcactttatatggattgtaatttaattgcgaggaggcagactgatgaaaaggacactgtggatttccatggacggacagttattgctacgcgagcttcagatggcaagcctgtggatgtaagttgtgatgttagttgtgaaagagaactaaaatttctaagtaaaaaaaaaatcttattaaaaacattcttcttttattactgtgtaatagattcccttctcatcaattttattaatttaattaatttgccgtcagatgtgtgaagaacagctatgttatttccaattgtattttcacatgtattattttcactccattttatacccattttctccagcctgggaatttaaaataattaggtcatgccttaaaaaattagattattaaaagtaaaaattgaaaatatgatacaaaatataaacttggtctaagttcatatgttttaaatagaaagggctggaaaaagctgaagttcaaattaaatggttccaggttatctgctattttcattcaagaacaatagactattcatccttacaatagcaattactttgtattgcagactattttttataagcgtataatggtttttcagggttctattgtacagaaaaattcactaaatgtattagtaggtcatttgaaagagaaaaattgcctagtaaaacccttttggataaaaagttactttaaatattacatttgaagctaacatgatatagatttattattgatttccctagagaacaaggtctgtaatcttaaaaaagttagatatatctaaatttgatggctgcacgttttcttagtttattatgtataaacagtttatagtttatttcttagagtttttgcaagaatgagatccagtcttggacctcaatctaagaagattgagtgttctatgtcctgtgtctcattaacttctcacccaaggatagaattgatcccgggctaggcgcagtggctcatgcctgtaatcccagcactttgggaggccgaggtgggcagatgacgaggtcaggagatcgagaccatcctggctaacatggtgaaaccctgtctctactaaaaatacaaaaaattagccagatgtggtggcacacgcctgtaatcccagctactcgggaggctgaggcaggagggggaggttacaatgagccaagatcatgccactgcactccagcttgagcgacagagcaagactttgtctcaaaaaacaaaaaacaaacaaacaaacaaaagaattgatcccacaatttgaggctaaagaatatcacgtgaatccttataaaaaggatataggtaaaaaccgtggtattacagtggtttcataatttcatgtggattcttggttcatttgaggataaacttgaaggcatgtcacaatgatgcaatatttttggagatagtcactgtttgagttaaacaaacaaaatacatatttttataaaagattcttggttctactgaaactttgaatggattaatttttcatcatctctgtacaagctctgtgattcataagatctgttatggtgtgaaaatgtgtttatttgggctgtgtgttattgaaaaaaattatcatgatttagttttatttcacctatcccacctgtgtatttttgtgagaaagtgacaaaactgatatgaagatttttttttaaatcaactcagcattttgacaagcatcagtacagatttagccttaagcattctccttctaaagcactatatcagtgaagcattctaaagtaatgaatgaataaacaaagcataaactattctgactgtcatttcaatgtcatggaactcaatcaggttgtaatcctttgaaaattgatcatctatctttagttaagtaaaacaattcataagcaggacctggtacaatggatggtacataataggatttcaatatttattgactattttgataacagtgataataaaaaagtttagttaagaacaatattaattaactagagttctcattcttcattctaaataattcatatgttactgctggtatttcattatactatgtaagacggtgtatttaaattttataaataaaaattaaccttaataaccttgcaaaaagttacagaacataaatcattacatttcatttagtctcatgattttgcattttctgcaaatcttaggctgctcatgaatctgtaagatgtctggagttgttaacgcattctatgaactgcattgattttgttcatctgaggcgaaaagtaaaagttatagatttttcccccctttttgcttttaaagttggagtagagattcacctctaatcacaaatgcctgctttctattattataagattaattattataagattagagttgggtctttctgtataaagtacttattgacctcaaaataatgcattatttaatacatttcagtgcttaaagaattcaaacagcctatttaagaatttattatattgctattttatcaataatcagtactatttactttttcttaggtgttgatttcatcttgcatttaaaggcatgattttactttccttgaactacagttaatttcatgtccaaatgccaaaaaaagagaaatctgctaagcaaatagaaggaatcaattatttttgtaaaaaggttgttagccctgcttagattataccaatataatataaaatcaataggttttaggcagaattcgtgaaatatagataaaaaattttttttccttgttggtaagtgaacacctatttcagtgcctcaaataggagtctggaagtacaaataaagcctttctcatcatgtgctcatatctttgattttaccttttctccaattttttttttattttgaaatggcctcattttgtgggcattctttactgtagtgtaaaacaatagcttttttaaaattaagtacttctattttattgtttgaaacagctagccaaggtttgcaattgctttcattacctgatttcctttatctatagatccatctctatatccaactctatgtctctcaagtagtccacaaaacaatgaatcctacatttaataaaaacattaaaatatccaccagtaatttatttatattagcttcctttttctttctgattaaattactgtagttcttaactgcctgaatgtgattccaaaaaactaaagatgtttcttattactaattttttcatagattgaacttcaccaacttaaaatctactgcagtgcaaacctcatagctcaagaaacatgttgtgaaatatcagatactaaggtaagttaattttctttgcatatgaagaatgaagaacgccaattatcttttagtggcatagtttgtagagtccaaatgtagggtagcactgagtgtgttctgttgaagccaggtgggtaatttattcctagtaaggaagcattcatagtgctttctcatggttactttcaacagttttaatcccagcatttcacccttaattttgagggtaatatatactcactttgaactcagtataacttaaagttatgcctttcttcctaaactatgttctgacagcagcatcatttccagttacagaagttttaaatctgtgatcatactttattctcactcattttccttttctaccctgtcacccatcctggctagctttcctttgacatagacttttcatccttatcttccattttcctgttactgccaaagtgtacatttacctcgtgtctgggatatcaatcattattggatcaactgccttccctatgtcctgcccctttgctttgcagcataaccagaataagtctgagtcactgctttgtatattcattcactctcttccagcaaacactttattcagaaacactgaccttctaaacactgtgctaaggaacagggctaacaaacatgattaaggcacattccctgccctctcttcatgtctttctcttaagtgactcctgttggaagtgaaatataaatgcagtttctcagcctctcattctaaatattcccaacctaaccatacaactgttacttacttataccaatctttcattacaagaaaaatactaaattcaatactttctgtatctctcagtgtaatggccgtgtgtgctatcttatattactaggtgtaactatatttgtttttaaattgatttaagtacaattcagactcagtaagggaagttttaccttgataaacttttttattcctaatgcttcatttggaaaaagtagacaatcattgtttgatttattgacttaccaattactaaaaaagataaatgggacagaaagatattcaaaggggactggttctaaaaaaaagtacagaaagagcatatgaaaagtgcaagtaaaaggtgaaaatgtcttttctttggatcttagatttcataaatgttctatacttgccatagaaaattatatgaaaattttatcaacaatttatgattcaaaaatatttttgacttttgtagctcactttgggtagtgaaataagaatgtgaccaaagcatagcttaaagcatagctttagtgacttaaagcatagctaagtctttcaagtattatatgttttgcttttgtaacttggctttataaagcatatctccaatccacttcatgtatctcattccaagtaaaatgccagccagccaaatatctttctataaatatctgaaaagataatttagaatgccaatctacagacttgaaatacctagacttcctggagctacacatttaaatcttaaagatgttaattcccccaaaattttgtttttaattatgcttttttgatgtcagagtttttaaagtaataactttctctggttgtaaagtaatataatgatattttgatatatctgaatattatataattagccagtaatcactgccctttatcattatattaatgtaatagaaactttccacctgatttatgaggaaattgtttaagaagtataggtgatgaattgggtggaatggttggtaattcaaagcagtgacatgatctcacacattatgaacaaaagatttttaaatcatattttgaaaagattatttgggagttagttttaaagaatagaacacaaggtaggaatttatctctgactatggaaaaaataaggaaagactgtatttttgctgacaattatttggaggggatatcaccattcatttaatgactaacaaaaaatagaaacatactacattttatgaataggaatgtacagttggaaggataaataattatataaaagccatttaaatgcatctgctctacttccaatacgaattgtatttattttcttttttgttgcaaaatgttttgaactcagaaatttttaatgtagttgcttaaatatctaattttgtcctggaatttcaaatcacacatgttttctggttgtcaatattttataaagcatttcaaaggcaacattttttaaagatcacctataaagatgcttctttgtttctattggattttcagtttctaaagtagttaagtttcatgactctagatataaaaagaatgaagaacaaatattaagagaaggatgaaatcagtaacatttgttgaaaataaatgagaaatgtggttaaatttttaagggctaatactgaatatgtgtcaaatcaaaaccagaggttttacgaggagaagagtccttacttgtatgtttggtgttgcctctaggcactttttgtggagtgtggacaggtttatggtgaagcctgagacatacttttaaagttatttaaatcctcaatttaatatagtgactcagttatccagagcagaattgtgaattctaagtgggtcttggttatctgactggaaagccatgaggtaagaactggctgaaacatcatatcaaatcaaatgagatgaatgaactgttttggtaataaccttgttccattcaaatatacaatagtttttagactttcaaatttgggaacttgttaggataaataatcctgaaatctggagagagtagatttgaaagaactagtggtggatacagtaaactagttgctgtatttctgggtgttggttttgttacagtttttattgtaattatcaaagaattcaactactaccaagtttttttttttatttcttatttccaacttttattttaagttcaggggtacatttgcaggatgtgcaggtttgttacataggtaaacgtgtgccatgatggtttcctgcacagatcatcaaaatgaatttttgttacaaaacttatctatgtttactggaaaatatagccaaatccataaaagaaaataaatatcaatcatgatttcaaccacagtagaaaaccacagataatattttagttttgtatcctgaaaatactttaccatgcatttataatttgtggtatacaaagtaatgtattaactctctcctagtgctttctcttcgtgaaattgcaaattcagagtggaaaactatggtgagaagtctggtacatgatgttgagaaaaaacaatgtgtttatcctcctcagattctccatttgggttaattttttaaaaaatgttcgttgctttgtaaccaaattgcacttcactttgtccagcatgctctgaacccactggataagtataaaatgcactacttgtctgttgtagtggagacctttttaatatctttaaggaacagtagactagaacaaagtatactttgatttaataaatgttgtctaagagtgtaaaaagaatttattttctactttatatgctttaataatcatcttgttgaaggaaaccatattttataggttcaaattacatgtttcaactttaatttttgttcccaaaagatgtattcacatgttgtttgtacaaattattttattgcaacaatacaattattataaatgtatgaaatttctgtacttatcaaaaagttacctaatgtaactttgtaattccttaccaagaccattattttaaatatttttcttgcatgttgtcagtataagaaaacccatgggctcaggcggaaagtgcaaaagtgtgataaacattctcacactggtgttaacttttggttagtaagaagcagttcttgcaggcaacctcagcaatccctagtttagtgggagccagtgtttggaacatgagaatgtttggaattgaccccatttcctaaagcctctttttggattttagtgcccagagcaggatggctttggaaatattgcatcatcatgggtaactgctcatgccagtaaaatgtcttcatatctgccagcaaagcaggaacttaaagaccagtgccagtgcattccaaacaaggtatgctagttttaattggtgcacactgaaagccactccagactatgagcccagctccttgaatgtggcctctgttcacagaatgtgtcttgccattcagtgtttgttgaagtaaatacctcagttactggggtgggttaagaaaaaggcattgaagataggacttcctggattcttacctggatagtttcaagcccatctgaacttccttccagggtgtgaactagaatgaatagaaaagtgaagggaggaactacctgtacaacaggcaagtactgagtacttagcatgtgccaggaataggctgaagttctgggaattcacagttgaagaaaacacagtgcctgctcttcaaaaacatacacaaaaatactctacattgtatttctttttctgtatagactgtgtttttccagcatccctaaattttcaactggctgtctccatccaccataagttattaggggaatatacagaggggctctgttgttactcaaataatttgtttcatctgcaccaatatgatcccctggtcaagaaggctgtgccatggacctttatgaacttcctttatggatgttaatggcagtaataaagcctgtgctaaaaggctgagtggtgtcttggtggctttttccagtgcccatacctgaggaaaggagaacttgccccagtttctagagcagagtgtgccctagcactgtgacttaaaacatgtcatcgacttactcatccaccaccacttcaactcctggctgagccagatggggatggggtgaaagtttaagggaaactttcattttttctagtggccaatattgcatagtaagctctacgagaaaggcaaggttcgggggtccatagagaaacagcttgtgttccagctcatggaaggtctggaggagatgatgctaaatggtgtttggaagagtgaggaacagtgaatggaattccattggcatgccctttttcccttgttcacgtggctcactattcctcactctaagcatcagctcagaggagaacaaagcgttatcttgctagtgccagcttcacatttataaaccatttggctttagatcaatgtgacagaatgtttgctaacacagatatgcatttttgctcagggagaagcaggattaccaggagctccgggttcacctgggcagaaagggcataaaggagagccggtaagaaaaaaacaaatactgatggagaaaacagggttttgttaaaaaatgacttaaaaatgtgttcatctcatttttctttattctgtacaaatatatgtttctataaaaggctatcaaagactatattaaaatgctgattactgaaatagagactatcagcattctagtcagcttttgaattcatattggtaggctggtgtgaactttggaaagatctggaactgcaagtctttgtacctataagctctagcaaaactgtgaagcagaaaagtctattttctagctgtgccctagccttctttagcattcccttccccaaatccctgttgaattcttgcttctcttgtcttttgatacatccccaccagagatttttctgtagctctctaccttttttttttaaacggccaactttttttgaatactttctgtgtatgaggtatgttgcttggtgttgtagagcacataaagacaaataggatatattccctgttctcaatgattttacatctagaaagagatcgtggaaaattacaaggccatatgtgttaggtgctgtaggagagttgcaagtgtcctggagaaatgatctggggagctagggaggatttaatggaggaatggccagtggactggacctctaagtgtgtaattctaggctatatcccatgcttagagatttgtctttcccttctcccatgactcaaaacttaactgtaatgtttctgactcttttgagtatatcttttgtcagctaatcaggtaaatgaatgagcactgttagaagttgattctgtttttattatctctccaaggtaaaatagattttaattcctttcctgccttaacttgggaagtccatgattctaaattatttgtataatctattgctccccccgctttaaaaagacaggagacggaagtctgagaaatgactgatccctcaaagcttcaacaaagctaaagtcatttgattcctgaaggaatgtattcccatgtaccttgcatgggaacttctgacaactcagcaggtgtttgaaaaagatttttgaggagggacaggccatttattattgctctttaaaatgcattgcttggggtacctttactttcaatatcattttatgaaaattcaaaataattgaacaatatctgattctaaagaccacttcaatcaaactaaacatacaaatcattataccaatagcaagtatttgtttcatggttacatgtaccagacactgagaagaatgttttagatatgttatcatacttgatccttacactcactcttcatgttagggattagtattagcattttacagatggaaaaactgaagcttaggggggttaaattattgcccagtgccacatagcttgtggccaaactgggatctgaaaccagtaggtctgttgactactcatgaccagtatccatttttaaggctgccactatgttctaaaagcaattcagtattatgtatctgtgttctttgatcaggtacttccacttgcgatattttactcttaaaacatcatttaaagatgccagcctagtgtctctatcctcattttacagctgagagccacacataggtaaattgatgtgcccaaggtaacacaattaagaggactcagaaagtggaaagatctctgagttaatcccaactcttctctggttagagggtgaatttggccaagccactcagactctccatacataagttttcttatctgcaacggaaggtgttctcacttatctgttatacctatactataaagtgacaccaaaatgccttgaaaaaaatgcatgtggcttaatttttggtgactgtgatttatacacgttcacatacacatttcttaacttgtcttttcacttctttgatttatcagttccttcatatttaagattgctggcacaggaagaaatttcatgtgttgcttttaggaaaaataccctgcccactgaaaaaaaaaaatctatgtcataagtacagtcctatttgaataattattttaaaaatcgttaaatctactttaaattcttttttaaagattaagtgcttagtcactgttgttagagcctataccttttaaggatgcattttccccctcgattccctttaatcataaatagacatctctcactttaacatttaaatatttatttttctttattcattcatccatcaacacctatttattgagctcctgctattataataaaaaatgtgccagactttggagccttagcagtaataataaaatacagggcctgctctcaccgagtttacaatcttgtgacagtttgttcacagaacattctctccttctatagaaactaaaaccagtagaaaagaactaggaaaaattaataaaaatggataaatattagccaatttattgtatgtcaaatctataaaatatacaaaaatgtatcttagagtaacaatgcattatatgacttctcatctgcagtatgttttaagaatattaacatttgttttaaattccatgataattcataatggcaagagattttagtggcaacgtaaaaacagctgcaataaaggaaatttataatctacacaacgaataactaatctgtgtatttcccttatcttttcaatacatgcacccacatttgcttaaaccaacatatgctctgccttgtaaaaatgacattagatgaccatgaccatgaatgcattcaaccttcctggcacttgaaataaacatggatgtattgtttcattttaaggaatggagggtgggtttatttctgctcctattgcactatgtgatcttgcaactttaatgtgcaataaataaagaaggctttccttcatttttgattctggcatgtaattgtcattattagagcaggtgcacaaaataatgcctacataacttgaagatcgaaagtcatttttgctctaaggcatattcagtagtaaattttgtgaaatgatcagaagtgcaatgttactaagggaatcagatgttgttctaaaggttttctttttgatctgtaagcccaagaaggaatatttagaggaggtagaacagtatgttggaaagagtaccactttggagcctgaaccacttaggattgaatcctctccacctcttacttgctttgaaaattatccttaataatacctagccagtggttgattgtgaagaaggaatacaatacaatatatacacagcacttagaaactggcatattatagatattcaacaaatatatgtttcccctgctttcttatccaccatataattgtccatatattgaaggagaggtggagataactattttaggttgagtttaatttcatttgtggcttgatgaagaacaaaggaatcttcatttgtgagatactgccttagaattttcaatttattagatgtaaaaatgttgagttatcatcacatgctacttgtggtaaatagtaataattgatcaatagttgatttcttcaaaagattactcaataagttgactatttcattcaactctgtatcttttatttccaatattatctgtatctgaccttctctggatacaatgtgctagttgctttttttttttttttttagacagagacttgctctgtcacccaggctggagtgcaatggtgcaatccctgttccctgcaacatccgcctcccgggttcaagcgattctcctgcctcagcctcctgagtagttgagattacaggcacccgccatcatgcctggctaatttttgtattttttggtagagatggggtttcaccatgttgaccaggctggtctcgaactcctgacctcaggtcatccacccacctcagcctcccaaagggctaggattacaggtgtgagccactgctctcagcacaatgtgctagtttttcaaatatgttccttgcattgttttacttagataatgtcgattagaagccatccagacacaattataacttactttttctcattaactgtataatattagtcttttggtgcattttacttttggcccaatgtaataaagtgagaaaagatttgagaatacaacttccacatctctttcaaattatatgtcactacattacagtatttctaaaggtgttaagatttttattaatatgttaattgacataacaattatacgtatttatggagtaaagtgtgatattttcattcatttatacaatctgtactaatcaaattgggataattaacatgtccatcacctcaaatattcattatttctttgtattgggaacattcaagattttctcttttagctatttgaaaatattcaataaattattgttaaccatagtcaccctacagtgctattgaacagaagagcttatttattctttatagctgtaattttgtatctgttaaccaacttctccctatccccactcccacccttcccagccccagtaaccattattctactctctacttctatgagattaactttttaaacttctacatataaaggagaacatgcagtatttatccttctgtgcctggcttatttcacttacaacaatgtcattctgactcgtccatgttgctgcaaatgatgggattttactcttttttatggcttaatgtcattccattgtgtgtatgtgtgtgtgtgtgtgtgtgtgtgtgtgtgtataaaacattttctttatccatttattaattgatagacacccattttgattccatgtattagcgattgtgagtagtgctgtaataaacacaggctttcagttatcttttcaccatacttatttcctttcctttggatacatatccccagtgggatttctggatcacatggtagttccatttttagttttttgaggcatttccatactgttctccataatagctatactaatttacattcccactaaaagggtgcaaaagttcccctttctccacaactttggtagcattttttttggtcatttagataatagccattctaaactagggtaagatgatatctcattttgattccaatttgctcctccctcatgattaatgttgagcattttttgatgtatttcttggccatttgtatgtcttcttttgagaagtgtctattcagatcattcacccattttaaaatcagattattggggtttttgtttgtttgttgctgttgagttgcttgagctccttgtatattgtggatattaatcccttgtcagatgaataccttgcaaacgtttactcccattctgcaggttgtctcttcattctcttgatggtttcctttgctgtacaaaagctttttattgcaatatggtcccatttgtctatttttgctttggttgcctgtgctcttgaggttgtagccacaaaatctttgcctagactaatgtaccaaagcattttccatacattttcccccagaagattcatagttttgggctctacatttaagttttcaatccattttgggttgatttttgcatatggtgagagataaggatctagtttattcttttgaatatagtttttccaacactgtttaacaaaaagactgtcctttcctcaatgcacgttcctggcacctctgtcaaaaatcagttggttgtaaatacatggatttatttatgggttctctagtgtgttccattggtctgtgtgactgttgatgacaatctaaggtgttatgctttgagcatccttactttaatgcagcaaattcatagagaaaaatgttactcttatttatacacatacattatgagttagacaattattccgaatagtcatgtaagcaaatcctgtcccacctgagccaaaacccactaatgacttcttgtctctcttaaggtaaaccccaaagctctaaccatgggctatgaggcttcacataatgtgtagagctctcccctacctgactcctcaatcccagattgtctcgtaccctcttcccttgttcacttttgctccaagtcctttgtaccagttatgtatgcctgaagtgtccttgtccacatccacttggctcgctctcttcttcacatcatttaggcccttgctcaaaaataactttaaaataaaaaggccttctggcatctctatataaaaagcatccttactcccacctctatcctcttactttgcttagcacttttactgccacctgacacattgtcatcacgcatctatttctttccctgttggaaaatgagttctgtgagcctatacatagaacaacacataaataataggagctaaaaatatgctgaatgcatgaatgaacactatacctcaaggaaagtttaaataatcaactcagctatttctagaaactgtaagttctccttcctaattgcccaggagactctgctgagcaaggcaaagattcaatttgcaaggaaagaattaaataatattatattgttaactattgttctactacagttttttcttttaaaaaacaaaaattcttttcacattgatttaatcaggtttagcttagtattgtctaggtaatgaagcatcaaaaatattttgcaaaaagccagaagttttggcaaaacttaatatgtatttttatttgcctattttcttatctactatgatggtttattaatatgatttactactttttctttttttataaaggtgatggtcacctctcatggaataatgcagttttaagtactactgcttgtatttaattatctagttgtgatcagcattctatatcagaacacctaatcaagcgattttaaccatgctctttaacactaaactctgtataacattatttgaagtaataattaatacttttctttcatttagactcaattgtaataattttctgaattttttaattcccttttgttagcaaatgtagttagcaacctaattccttagcaactgcattactttctcagttctttaagacccttgttaataccctcacccatttcagagctgaaattctctcagagttttataaaatattagctcaattttaatgttcttgaacctgaggggaagtgttatctgagctccattttgggaataattttccagtttatttttctattattatcttccatatctccagttaatttgccaaaatgtgttgactttatgaaatgattgctttgctgatatgctttgacagaaaatcaaaactgtttaaaatggaataagttagcttatttgacttcttagtcagaaactggtattgatttatttcaacttctcctgccctccaatcccactatagaggttttcattttgagtagtctaatatgctaacccagagatgatgagtaagtttcccctcattttctttccaatctgacattactcatatgcccattctgtaaccataccacaacaataaaaattaattaaaccaaaatacgttcataatttttaaaaataaggataccttctcttagtaataactttacagaagtaggatttaatattattcttttgacttcttttaatatgtcaatataagaaataataatgtttctttatcctttctaatcccatattgaatatattgaagtaattgacaagtcctttttttggatcagttttacccaatttgatataatctcatgtaatctacaggaattcacttgaaggtgaaatttacttgtgggtcttcatctgaaattaacagatagtatcattataataatggtattacatattcataaaattacaatatatttcttaatttctaccaagtgttagtgacagagaaactcattcaaaaagtgtatattattttccactgtttcgaggataaatttattagactgaatttgtgatagtgcttttaaggaagccatagatgatccatagacttccttgcacctgtttttccatccctgcttggcagttagacagaagagcaaggaagctgatcattggattgacccagctttggggtttttcctggaggatgtaaaggaaagtcaggcatactaaatgaaacaaataggaatatcttagaatctgaaatttcctgacctacttgaattgaaagcatcggataggatgtagcttttaactcatttaaactcatttatcatattaattgaagtaacagcaatagtattattccttacatttggtaaatgtacttttggtaaatattaaatcctacttctgtgaggttattactaagagaatgtatccttatttttaaaaattatgaacatattttggtttaactaatttttattgttgtggtatggctacagaatgggcatatgagtaatgtcagattggaaagaaaatgaggggaaacttacccatcatatctggattagcatattagactactcaaaatttggtaaattacaaagctgaattacatatttctgtgtgaatatgtctagttttagttatgattagcacttagatatttacgaattactgattttttacaatttattattttggcttgtgggcaatatgaggaaggaacttgaagcacaaactttggtgcaagcaaaagcaactcatctaggaagaggtagattcactttgacaacattagtaattaacgcaccccttaaaagtaatctcctaataagcatttctgtattttagggtgcagttggtaataaaggtgaatttggtgctcctggaattcctggggaaaagatatgatggtttactctttgatcaaaatttatggttattttataaagctgtatcagataggataggaaaatatacagaacaagtcctatagtttagaggtaatcaaactgtggccctatagtagggctgccagaaactctcactgtaggattttgtacataaagttttactggaacacagccacactcatttgtttttgtattacctaaggctgcctttgtgcttcatggccaagttaagtaattgtggcagagactgtatggcccacaaaatctaaaatatttactctctggccctttgttgaaaaagcttgctgatccctgctccggaacattggctgctattcttttagccccagggcttctcaaattcaccattttatatataatatggtgtcttaatatgtatttcactgcagacaaaaattaggcagtttatgtaaacattttataatatagactataagacatactataattaaaaatataagaaatatatttcagtgtatcaataaaatgctatactgtaggctatagctcataaaatgattgatttttatgtttttcctgtaataccacaaagatgattccaaacaataaattcactcacgagaagttactgttgcagtttagcatcttattcaacttcagtttttgtagaatatttaaaaaattgttgtatttgtatattaaactgcaatcaccttgtcgtatttttccctatatatgcctatattaatattaataactttgctaaatttttaaagttctcatatgttgatgctaagaaaattctcttctttatgaaaatatgcttagtataagtttttgtggcattctagctgcactgattatcaagtgagtccattgtgtcattatctagaaggccatgaccattgtggttttattcacctaaagttagcacagcaataactgaagctgaagcagtaggaggttcagaggttttcagacagatattttttcagaccttcataaatgtgtctctggtatctgatggcttcattgatgctactttttcctttcataaattattcagtctgatatgcaaattctttactcctataggaatgtaactgttaaactcagtaaagtccaacaaactctattgaaaaacaataccttgctgcaagttgatgtttatttgggctgctatcttcttgtataagcttactgatgacattaattgacgattcttcatcataaataaaagcttctttaaatacttgttcaaagttctaattctttaaaaatatcttttctctagagaatattacttgatcacctaaagagatgccccaatctaaatttaccttgtacccttattctaccaatctttttctaaaatgcatcacaataatctgattgtttagatttcagatcattaggagtttttgaattattctgaacatgggaatcttttttaaaacatttgcagaatcaccgaagcgcttgagctataaaatagattgtttgactttattgtgggatgtaacgtgagacttacgtacatttacacaataaattatggcatagcaggatagaattccctttgaatgctttaaaacagaatttatcaaggttggtataaaatagcattaattttaacactccaaaatgacagcccttggatccttatgtatgacaaccaggtgcaaactgctacttattggttgtggaacaggttctcaactcctgaaaaggtgatgtccacagactgacaatataaggactagatgaagcattcagtagaatcaatcctgtcaaaagctgatcaaatgaattgccatccagggccatgatagtaagaaaacaagtctagaaagttaagtatgcaagccaagaaattctctagaagaagagagagtttcttagaaaagagagggcatttagggcaacgtgaaggaactggagcaagtcagtatttcagagacaggcactactcagaactaaaaattttgtttcttttcccagaagtccacttttgtagaaagaatcttgtgtggtgattcatcctatatttcacttaaagtaaaacttcagtgaatataaaggaaaatactgataatctagttagatgaagtcattctgaaaaccaaaatcctcagcccttggtgcccatttggtcaaaatggtgactgagagagtcttgcaaaatcagttaatgagtgtgtctgtgtgaagacactgttcccagagaacttaagaagctaatatcataaagaagcagctgtttttatggtgttctaaaaccatggcaaaattgtcctggcaaatactctttcatgtttcctcaagcagttttcttctgggtctaatttacttgagttactcttaaagggtctcacagacagttagagaattcatgtaacttccagtggtgctaaatatggtaacagattacgtttaactcttggttcccggattcacacatcatcagagaccgtacttagtggttaatatccttccaatacctatagaagcactgagtctttgaccactttctcttcccaaggactcagtccctggtggtgccagctatgattctaacttgtcacttcatttagctgttaaaggggtgtgacactcttgagtgaaaaaatgccgcctcaatagtgttttctcgcttctataatccacaggttaccacttattgaaaataattctaaagaatgtatacaaaatgaaaacaagaaagttactagcgtattatctaacagtaggttaataaattgtaaaattttttttaaatttcaaaattttaaaatcatcctcatgaggtttatgtttggggtgaaatatttctgttattttacaagaaaaatggtttgttagatttttctaagtaaatttccagagaaaaattatcagttcttaacatgtgtgtcacctcagggctttgtatcccacatttgcttcaacgtgaaatatgtgcatcttccagagtaacttatccagcatccccttaactttgactctgcttgtcagcagttataattctttgttttgttttgctttgctttacatagaatcaggagtacttaagagtactgttaaaaaataaataactaggttgaattgtttaactgtttcacttggagcaaaaacatatgtacaataccatagaatatgtatctcaggtctaatattctcaaagtgaagatttttttctaaagttaacatttaagctaggaaactgatttatattaatggagtgaagcatattctgagcagtatgaagtattaatttgtacattaactatactttacacttacatcaatgtcatacttcaataaattaagtgatttgcatataaatcacattattctaaaataaacctacactttgaaatttagctaggtaatagcagtaaattcttttaagtcaagactctgaacaatgtattaatatactgtggtggcatttttcctctgacaccaaggataaaaatagtacactaaacaacacaattttataaaatgtatttatggaatgtggagtcatgaggactctaataaggatgaagtatagcatttagttatgttcttttgtaattgtaatacttatcacccagtacagacttgcagtagacattcttaatctaatattagttctaatctaataaagccttactgttaaacattgcataaaaataactgtcccctttacatttattcagaacagctatgattttgcctaagagattcggtaagtgttctgttatgagttcatttaagaaaatcagttctgtgtagcagtattattaggtagctggcgacttctggtaagcttggatggacagaaggctctgtcaatcaaaataagtaaactggatggttccatttccaagagaagtgaatgactcaaagcatgagatcacatgaatgcagccacacacacacacacacacacacacacacacacacacacacatgttcacaccttgcatcctcatggtatgaagtaggaaaatgagatgaggatttggacactatgagcaaattttgcccactttgcccccaaatataacactcaaatcatgtttgttttcattacctgaatacttcaaacaaaaaagtgcctcatttcatacttcacttatgtatttaaacataaaagatatatttctctagaagtggggatttttttctaagtaggaataattattgtccaataatcttatcctaataatgtgatagtaaaaattgaacaaatatagagcctaatttatgctaaaacccatattctatctactaaattactttaaatttgccctaaaatgtttattttaataggaaaacttttactaagttaattttgctccccatggagtaagtatgaagtaaatcatagccatcattactttactatgctaatattaaatactcagagttagactgcctgggtttgaattccagctcaaaatcttactctctaatttagagcatgacacttggtctctctaaatgtcagttttctcttttataaaacaggaattatattgcatctacttctagctttatcttaaggattaaataagattattcataaaagtgtcagcacctggtatgtaaatatttggtaaacaacagatataattttaacaataaacagtttgatgattctattattctagccttactgtgggaccagattagaacttatttgaaggaatgtatacacttcatcttagccaaaaggccaagaagcaaacacttgggggaatttatattagttattgaaaatatatttacaggaaaatgttaaagtcacatatcttatgtaaccttgacctcttaaaacaaactagatgtcagaaaaccagtgaattcctcacttattataaatatgtacaagaatataaacttttacaataataataataacagccatttactcaaaaagtgttatatgctaaatgctatcaggagccttcttcacattatttcattcactccttacaacacccctgtgaggtaagatttattgtcactatttcacagattaggaaacagatctagagagagagagggaaaaaaaattaaaaacttcccctaacttggtacggagaaaatagtagagtcaggatttgaacctctatccatggaaatccatagctcttgcccctttgccatattacctcatctggacagctcctcaaatattcagatttcatttacacaggcaggtctgaattagatcttaaatttgtttgcctgccagtttagtgagtgaactgcagtttgcttcggacatcctgctccaaggagggctgtgtcccttccctttaaatccaaggaccccttttaaactgtatctgaccctagggattctgactcccccaccttcataagattgtgttcacctattaagaatcattatgcatatggtttttcaccaaatgagagggttttgtctagctttaccttccaaaataagtatcatggaaaaaaatttgcttggtttccaagtacaggttacatttgaagtgtgttttcaaacattccgcgcttgactctctggagattcttaatctaccctgcatgcccacgtccaggcagctcaatcatgggcactctccagattaaccttaatgcaacacctaatgtagaaatttttctcttacattctccaccaaataaatatatataatttatttatcaaaaacaaaattgtttaacttagtaccatggctttataaaaatataaaataaatcaaccttctggaagtaaaaaaagctgtatatattaaagcacttaagaagtacatctgataacatgatgagagagtggccaagctgcatgtcttaaaaatagctggactaactatcatcattatatgaggatatgctttgtatgatgggtcttttcaccataaactctgaagccctcagcactgcagtgagatgagactgaatgaggcagatccattgttccctaacagtctttgtatttcttttctgctggaaaatgaaatgactatgatctttgaatcttgattttccctaaaaagacattttatgagaagactgcagcttcagaaaataaaggcagatgctgttacagtttatgtaagtgcagacaaggccaatcactgttgtgaattataatgaactttctaacagtgctggtccagatgtagcattaatgcttcagagactcagaaacttataggcaagtagtataaaagctagagaattttaagccatttggcttcctctctatatttctagcctcacctaatttttctgtgcttaattttagacttcctaagtttaaaacataatttaaaatgcctaatgcatgtgacaatttattatagaaattgaggccattaaatgaggaggaaaaaaaaagacaacttagctttattctatcaatggaatacttcctgcctatgaaattgttaggctttataaaacaagaatgttttccactttagagaaaaatacctcttaagcagagaatcacctgtatatctgtgtaatttagaaaattctctaatgagtgaaggtatagtcaaatctacacacaggattgaatttttaatcataattagtattcatagaaaaaaatgaccacaaagaaaacagttttgtaagcctacttgttggctttacttgttaaaggtaggagaataaaacttgaattatcagtgaaaaactattgctcttacatggaataactgtcatttaattgtcttatctatagacatatattgatacaatatagcactaaaataagcagaaacataagaaggacaaagtaatagaaggacaggaaaaagaaaaagaaacttgctcactctgcagctgattttatttcttaatggtttcttattcccttctaatgccttccactcacaccccaagtagagcagttggcagggaacacaacagatggatgacaagctcaccacatgccatgtatctggcacccaggcacttgacttttatttgctaaacagtcagatttcaagaacctagtctgctaatgttcctgtttggtttaatgtactaccagcttctagcacgtaaatattaaaatattgccataagaaagctcacacactctgtgtttctctgcatagttaagtggctaattattttattcttggtgtagatactgaacagtggatttaaacatataactggtattttataaagacatctatgattttagatattagagtttccttaaagtggctctatctaaaggagcttttagccagacacatcagggactgccaaagccggtgtaaggtattgaatgaacctgttagggaagactagaagatttgagcagatgatcacagatgattggtatctttcttttctatctccatcactgcattttcagattattaaactcaaaacacatgcatttttttcatgaattctcccaggccaccaggcaaaattacagcttatccactcagctcacatagcactttatttatatcaccaatgtagagtgtgtctatacaccctgctaaaatgtgagctcctggagtagaaggacttggggtctgtctcatctctaatcccagcaactgacccagcgtatggtacctggctggttctggataagtgtttgttgagttgttcagaattcgaggacttagccccaagccagaaatagagaagagaaatagagaatgactgttagaaaacttcgctgaggaaagatcggaaaagcaccccaatgccagcaacacttcagtgaaagtccttcgtactttctacagaagcataatttagggaaacaagggaatctcttctttgcacaacaaagtttacaggtattgcttcctagaattaaatataatagaagtgtgtgcatctccagaatttgctttccattttctcttggagaaagtatgctcttccctctctctcaaacacaaatattcaagttatattgctttctttttatccaaactagatttgaaaatctcctaactttcttacaacattgttagggtgtgttccttctccatatcttcataaccatttacttcagggctaaagataagtaaccaatggcttcagtacatttaaggtccagtagaagtaattgatatggaatagaactataaattactcatcacgaggaatactccaggcaggaaatagttttcagttactgctatatcattgtcctcaattaggagctgactgatgacactgtccttctctttatatcttaaatcatctttcacttgttagaattctgtattcagatgtcaatcactatacttcagatatttcagtagatgattcacattaaataagtatttctgtagtatttttatgaagttttaagtttggtttaaagactctcttacagttagtctcataataaagtgaaaagcccaaacatttgtgcctgacactttcaggaaatcatcacagttacataggagcccagattttgtagtgggttctacaacattgactaaggcttaattctctagctttgctatgtgtaggaagaaacttttacctctccaagacatttcaaaattacttgggttttctttttgtttttttatttgaataactcttagtacaacttgtatttaattaatttgaaaaaggattgtaaaataacatccctttgacaggaaaacttaaggattgtagttgactacaaatgtagcatatgtaaacaatttagttttaaaaagaagcacgttgtattaatagaagtacaaaactgtatagtagccacagcaaagtgtgtgtgtgtgtgtgtgtgtgtgtgtgtgtgtgtgtgtgtgtaagagagagaaagagagagagagagatggtcctgttctgtattctatgtgagtaagaccatttctggaatgatgtgctgagttctgagagccacattttaaaagacatgactgacccgtgtgtgcccagagaacagggaccatagtattaagagactccaaactatcatttgaaaaatgagtggtttactgaatagaaggcttgatagtggcacaaagggatgtcatgtataagacctataactttttttctgtgtaattgcagacagaagaaataagactgatgggcaaaatatggggaaggttaatttgggttcagaaagcatttattcagtaaccacacagtgaattttttttctttgctctccacaatgcaaattaagcagcaaaagtatttgactttaagaagctttcaatagagttggtgcctcatcagattctttggtggagttgttatacataaatgcatgaatttatatttgtccttaaatttaagaatgcccatcctgcttgttttctaggcacatgcacctgtatatacatacatacacacatatacatatacactcaggataatagattttaagagagtagatgttgttagctaccactaaccacccatacatacattaccatgatcaagacatgtattgacccataagaataaataataataggatctaattcatttaagattaaagtttcaaattggccttatcctgagcattaatgtgattaaaatatccctatgcattagccgcattaaggatccaaaaaatataaagaattcaaaaagtttgagattttaaattctttgctatatatatatttttaacttggtaatttatttcttagaatgaagtcccaaaatatagaaggaaaaaattctccccttgaaataaaagcattcagattggatatctgaaaaaaatttaaaaatataggtttttaaaaatttcctgaaacgtttaatggactgccaacagtttaagaaccataaaatatttcaatttctaaagattatggctgaataaagcaggactatagtcagtaatgtagaggtcaccttagtaatacacaaaatcaaaatcagatttacttttttctgcctattttattggttttagtcctagaatcctggcattccacttctgatatttcttctagttatttcatgcaatattcaacttaagtaaattttcttttaataaatatgaactaatgaatggggaagtatgatatatttcaagtggacactaaatttatatagaaggttatactcctagaaaaatatgctctaagtaaaatgataggtcaattttttcagtacagaaatgttataataggatctcggacattttaatcaaaggctgaatgtctaactgttaaaaaaaatcaccacaggatagtatgtaactttctactttctggatcaaatgctggttatttgcaatttttttgtttccctgcttgctttatctttatttgcttggtctcatttatactgggtttgcaaactatagccctagggaatgtgattttttttatcaaatgtccttcagacaatatatgtttcctgcacaataagaaatacattacttccaatgtcaaaagaatcaagaaaactaataatttatagtttatgaccagctatgcttactgttgaaaaatatgcagtgattacaaggacgtaaaattaaatccagtgatcagtttttcagaaagcaaccagctgaccctaaacatcacctaactttgtcccaaaaacttctcaaagaggttattttgaattttggaaagggtactttttgattgtcctgtgaagttaaagacatgctatgtgttatagtaataacccaggcaacgatactatcggcagcaacattagattttgcctgctttatattacacatatttattaacttatcttcctgtagtttgaatttgtacctgaaaaggaatacaagtcctttcatagaaaaccccgtaatgaaaaaaaaaccctcagaaataagttttgaaagttatggtttctatgggaatcatttattgtgattttctttcaataatgaactaaagtattgattggaagccaaagaagaagcatcttatttcttcttggactgaaattttgaggaaggagaggcagcaggagttcagaaaagaaaactaatgtgtaccttccagtaattttaggaggatatttattttatgaatagaattaaatttgccctcaaagtgcttgtggcacctagaactataaacctgggtgtcagagggagcataaagaaagacttcttctgttgacataaggtaggttttagataaacacatttcctatgagataatcagtgatgtccactgagttatcgttgagtctagaattatgtttataaaacacattcagtcaagaaagagcagagaccatttaatgctggccacaggaaaacacagtgttttaattacaacaatcataaaacctgtgtccattaaagacatattctcaatatcacagctctagagagttttggtacccaattaacagtgcatctgggtgtaatcctaacctgacatatggcaggctaggactttgggtgccagtacccagagcacctggtgcatgagtgggctgtgagcaaagaaaaaggggagatactatcacaaccttttttcccaaaaaagtatttttggcagtgtataccgtattggcgtactttaatggataatatgccatatctcatgatcgtatgtaactagtaatatgatataaaacattatactggatcaactgatgaaaataatctgctccttatggacaagtggacatacttctgtgatgagtaacaggagctccatttccatagactgtttcctggcaccaaatacttaatgtgttttcactatcactttatcaaatgatattggaagtttctaatagatttgtgtgatgcctgaggtctaaaactataacaatttgtttaatgatagaaatgtatttattatatagataagtagattatattttgttgattctgtaacatttaattacatttagcagcaaagttttactttagtgtttagtatatactgtgatgatagctgttttaccgtagaatactttgataatttaatctaatctaagaaaaacctcaatctttaaaataatatgtgtgcatgtatgtagcagacatctctggtaagaaccactaaaactgtccttaaaatgttttaattaatgaaataatgaaaaatttccttagatttagacagaatattgctattttaaagtttaaagatgtgacttttttcttcatagattttgaattttgcttaaataattcaaataaatgatagctaattgctttctagggaatgtttaaaaactgttatcttataaattaattgtaaatatttgatagaaataaagcagttccatgaaattgttagcgtattttgagctgtctaaacctggaaactcagaagccaaagtaaattcctataagcaggaaaattcctaaaactctattgagaatatgcacatcctctcaagagtatctcattctagcctgtgtgctgtttacaaaccagacttgtcaaagagatgaccccagaattccagcaatggaaactaaaagccatctgtctttttacccaagacagaaaccagatgaacaggaagaactaaaaagtcttccaagtaattgctttatattaaatggcattgggtatgtattcaaaattgatctaatggcaatcaccagatatgggtaataaagtaaacatgcttgtacatatataagaatacacacacacacacacatatatataatatatatagtgagaaaaaattccgattttaggcaagaagtcacttaaagccagaattaaatctttttccaaagacagtgtaggaaggcagctaggtatgcagagttgaagtgtttgggctcaaattccaagtctaccacctattactgtgcaatgacctgtaagaagttcattgaggcagtattatctgcctgatagttttgttgtcaaaacagcagtgcctggcccatagaaagcacgatgtcagacttcaatattattcccagaagtttcaaagagagaaaatgaaatgagatactaaataacatgtggaaaaacataggctgtaggagacctcagtcccaatcaggtaagttactagttaggtgacctttgacatgttaccaaacctctcggagcctccatttccctattttaaaaattgaggtgacagtcctggatttgagaaataaggaacagatggaaagtccctatgcatgatagatattcagtattaggctacctttccccacaacactagagctatttgttaaagaccacaaaaacgtctatgttcatatatctttatggatcataaacattattctgtgtacttcttttagggtgaaaatggtttacatggtgctccaggattccctggtcaaaaggtaaagagttcttgaatgtttcatctgagttaagaattttaacgtgttaaaaataaatttgcacataatattctgaaattgtatttgattaagctgaattcactcaaagacttttagaaagctatggatgtcttttcaaagagaacttgtggaagcaatcccctcttgaagggaccattctaggaggaagctttatcacagagctttagtaacatgctcctccaaagaactaaatggtagtagtgctttctggggtccgtgatagctgctctggaaacgtttctgcttttattagtcagagtctaaaatgtaaaatagaacaaactgtactccctttgactagttttgttacctcttgcttatcttcttttttgtatatcccagatagagctaaacataatagttagaatgacataaaatattatatattacaaagatgctgtagacaactacctcttcaaaaatatttttctttcagaacaagggattcctaataagcaaggagttttgcatgggccaggctgcctcttcctgtgcctagtatctttctctttaacaagatgaacttcctttgtgcccccacttttttttttttttttttttttttgagacggagtctcgctctgtctcccaggctggagtgcagtggcgcgatcttggctcactgcaagctctgcctccgttcacgccattctcctgcctcagcctcccgaggagctgggactacaggtgcccgccaccacagccggctaatttttttttgtatttttttagtagagatggggtttcaccatgttagccaggatggtctcgatctcctgacctcgtgatccacccgcctcggcctcccaaagtgctgggattacaggcgtgagccaccacacccggccagggctgctttcttcttctgggaagaagcatggttatctgtgacaagcattactaaaaacacagagaccattatattccagtttcttggagggacggggagccacttcaggtggggccagctgtcatgataccatccagataatcccgccgcaggagagagcattattgatgtaatattagatgcccaccaaagccaagcatatcatttctgtgctctggagatgttttactggttttggcaacaacatgtcagaagttactatgcatgtaggtttttctctatagctgaaaatatcttttaaaaagatatgcacttatttatagttacagattgtgttaaagaatttatttacttggcccaataaagataataagattgaactggcagcaatgaaacggcaagcttctgaatttcttcacagcagctctagacaaaacccattaatacagcatgtactgcatctgcgagtcaagttgcaagccaagggatgtgcagatttatctgctgggaaatagttttggactttccagcagctgtttgtggtggctgcatcatgctgacattgtggctgatgtactggaggcgtttagcagcttcaatgtcagcttgaattaacagatcaagttaaagtctatattttaggaaaaatggtagaaaaaaatatagaccatgcattcagtggtgaaaaacaatacctaacaactgacatatattctttcctggtaacttttagagggtagatgaagcaaaaataattatttaattacatgcatgtaacacacacacatatattatttaatcatctaattatattatctaattatgtatactatttaattatataatcataaacatatatgcaattatgtgggtatatatatataaaaaacatactcacaaactaaatatgtatgtatacatgcatgcatgtttctatatagttaaaagctggcattccctttcatataattagtataaattttatgtaccaagggtcaccttgttgaggcattacagaaaaaattctagagatcagaaaccctctatctcctgtctctgtgcactcaggaaatgcttgctgaatgcttcttatgctccaggccctccatgggtggagagatgcacatgacctgttcccaacattcacttgctagctatgttgtcatgagtgcctgacatgtaggaggcactcagtcaacttttgttgagtgtatgaatgaaacaccagttaaggggggagataagcttgtcagatcagagagggtgtagatgaagaaagggagatgtacaccttttagtataatcatggtgattgagagccagcagccctccaaccaccaatcttctttctgtgactgagccagcatagtggacaagaagaagcatagcactggtgtcgaaggtagagccagaacccaagggttcaaacctgaactcattcatcataagacacttaccagaatggtatgccatagaagtcagctttctaagaaggctgtttccactgaatctagtaaaataaatagtaattataagaagaatggctaacttagtctttgccatgaactatgaggatgaatcaaactctcaaaacaaaccattgaggaagatagtattatcatacttattttatacctgagaaaattcaggcttatcaagattaaattgccttggaagtggtgaagctgtaacttataccctagaaaattgttcctttagtatttagaaatatttaaatcttatgtaacaatattggtttagagcttacatgttagaaatggttatttacaattactgatttttcattgtttgaaacataatttttattgtaaaaattgcatgtgttataagtatcatttttattactatacacatcatattcctcttctacagggagagcaaggttttgaaggcagcaaaggagaaactggtgaaaaggtaaatatctctttttacattcacatctgtaaaaagaaattgttcttgaaaatgttttgaaataaaatatttaacttgttttgtgcattccctataagcaattcaataattttatagacataactaaaacatttgcttccattgaggtagaataaatatattaatgattgccagaaatctttcaaaacttatttggatggtattaatagttagatatttctagttaaatttgtttcattgacatggaaatgatttaaacatttataaagcattatatttttatattatgaaatcattcactcactaagtatccaattatttaaataaatgtttgtttttatgtacaactggtttatcagtggaatttttttcctgaaggagtaaataagaacaactaactgtaaaagtcaggatcccacagaaaagacttggcatactaaaactcgaataatttcaaagagtttaataaaggcatggtttaaaaagtacggacaaggtataagaaaaccatagggattgtgcagtatcccaggtcaggttacagcagacctcttaaaccccacataattaccagacccagagacagagaaaagtgtgtggccaaggctggagacaggagctgagggtagcagtcagcccaagataagcacataaaggggaaatcagggcaataaacacctccatcccactatcctctagccctcagctctcctactagcccgcaccagccaaaccaagttgagagccagtgagaatggaggaaacctataaggctcagcctcccaaagtccagagcaggtgtataagggtggacagtggatcatgagagaccaatggcagatgccagcccactaatctaagtgctgtcatttaaagtcaccttcttacaaaactaaattctgggtgcttaattttacatgttaatagagtgttttattataataaataactactgaaagtcatttgatagtgaaaatacttaagcaatcattgttttacaaatttacaactttctattgaaagtacagagaatagaatgcttggtcatccaaaattttccttcagataatcatttgaatcctttttcatttcaaaattcttgttttgtttttaaataaaacaaaaacagtaccattcttttgtttaataactcttgtgtacatcaaatgtatgtatggaattggatggccaggagagctagaaaggagaataatctcaaattggacagtcttgcctgtattttgctttcttgccagtgatcagttgtttgctttttcaataagtatttatagagagaatgagcatctattataattataagacaaagtacacatgttacaaactacatgataattacttttcctcacagaactcagaaagaaaaaagaatggccttataataaccatacttttggagatcatttcattaaatgatgactatttttaaggtgaatatcttttcttagaaatcccttgaacatttttgctttagaataacagccatttggaaggccatgtctttaaataaatgctttatttatacatattcctgatttattaagtgggattttacctgtaggaataagtagtgaataagcctgaacagatatattctctgtaatttaaagtcaccaatacactaaagtcttagtagttgttttgatagtttatatacatagctggtatagctcaataataaatagattctcacaggttataaggcattagaaaaccattcaccgtatttggcttcaaggattttccttgtggttccacatatctattaactgttgcattcaaatagtcaatttcaccacaaggtagaaatatgtttgtagaatgatttaaatatattagaaaaaaataaagcatcaaacagaaaagacaatatgtaccttgaatgagaatcccaatttagatgatttatagtcagatataagattcatgtaataaccgttatgttactttgattggtgcaaaagtaattacattacaccaaccaagtaaaaatgatgttctgctttattatttactgtatattaaatttttgagttttttcaatgttagcatgctacatattctgacccagaaccacatgtattttttcatgagataaataattgaggtcttgtagttcactttatttctagattaaacaagaaaagtctatgaaacattcacattggtgtgacaacagcatggattactcacaacataatttattttctgaacaaagtcaatctaccttggactttaattttttgtggaaaactgagtatataatcattttttaaaaacccactttcttctttaattaccctactgtggcctttactgtgtttaatttgactgtttgagtgacaagtcaccagttgcaaaatacaattcaggacattgttattggtcagagatgtcatatcttccagaaacacatagttacggtcaaaatataaaaattacatcaactgcaaaaggtaaaatactacctgatattttcaggtgacatttctataatgcagtggaaaccaactggagtaatctgcttcttcccattatggctaaaaaaaactagctttcaggccaaccgaactcactagactgacaaagtagctcctcaaagagttgaacactctctccttagtcctgagaaaaacctgtggcactagaacaagtataaaggacctcatttaaagtatatttctgaatctatagaaacttgtaacaacagggcagagcctcatacattcctgaacaaacacaattcagccaaattagtcctgaagtgaaagttattttaaggggtagtaagttctctcagaaaggttgttggtgctgacatgactctctcagatgacagctatttgcaggtttaccatgctgtggtttatcatgtagacctataggaatgaccccatcccacttcaccatccctagctggcaaagttaggtgtgtatcacccaaggatccttgggctctccaacagcatagctcatgaggcaggagggatgaaggaccctctccacagctgagagttgtattttggcttctctctctatataggagtagtcttctggggattttccttagattccttcagtactattattatagtgcaggctgctactacaaacaaaatacggagttcaatcctcagataacagttatccccatactatctgtcagccttcccagcaatgatttcatcaaactcttgttatgtaaccaaatgtaaatgcatgaactaagctcttacattacattagaagccgtccgggaggtggggggcagcccccgcccggccagctgccccgtgcgggaggtggggggcacctctgcccggccgccccgtctgggaagtgaggagcccctctgcccggccgccaccccgtctgggaggtgtacccaacagctcattgagaacgggccatgatgacgatggcggttttgtgaaatagaaaagggggaaatgtggggaaaagaaagagagatcagattgttgctgtgtctgtgtagaaagaagtagacataggagactccattttgttctgtactaagaaaaattcttctgccttgggatgctgttaattataaccttacccccaaccccgtgctctctgaaacatgtgctgtgtccactaagggttaaatggattaagggcggtgcaagatgtgctttgttaaacagatgcttgaaggcagcatgctcgttaagagtcatcaccactccctaatctcaagtacccagggacacaaacactgtggaaggcagcagggccctctgcctaggaaaaccagagacctttgttcacatgtttatctgctgaccttccctccactattgtcctatgaccccgccaaatccccctctctgagaaacacccaagaatgatcaataaatactaaaaaaattaaaaaaaaaaaaaagaaaaaggccatttagcaaggattcattcacgtgctcttcactccttaaccctgagctcaagtttttactttatgtccttgtgaaggtagaaatattacttggttacatttatgaaaagaaacagcaaatagacaatgaaatgtaaacatctgcctcattataccattcaatatttttaagtaattgcttcaaatcatgtaatttagtttgcttttaaaatgatgattattttatgttgtcactcaagttctaacttgaagtttgagaactaattttctcaaagttaaacttaactgcagaacctattgctaaatatcatttgattgtgagaaacatccagtggcaactgctacttataccttacttttcttgatttattacctaaaatgtagtcgacttggttcactgaatagtgatgtttaacttgggcatatatggtggcagattcttacctggatctaagatgcttctgctggtgtggaaattttccatttgggaaatgaaagttttctggtctcttgagggcctcttaagtttgataaaaagaaaaaaacaatcaaatgagcacttcttcgtgaatcataagactgaaggagaggtggagagcatcaaacatgtggcatattctgcagctgtgagagtccatggttgagcaagttcttgctttctcttgtttaggcttctgggcattatctactttgataatctttattgctgatcttttcttccattctgggttatactaataacaataaatgcaaacacaaaactaacaagttcatatggtccctgctttaactcatctcttaaaaccattgttggaaaactagttgtaaatttccagtgacttgtgattttttttattgtcttcttcttaccaaaatataatctaggtcctaaaatgccatatgagatatgtatttaaattagaaaactgtgtttaaatatttattactctggttttatagtggttgcaaatattttttaccagacagaatccactggaaaaacattccacagacccgtattcttagttgatttattgaactctatattgttataaaattccgtacaaaatataatattcaaatgaatacaattatttaaatgtctactataacgtagcgtaaagtacacgtagcgtaaagtacactttgctacccacaaactatctggggttatttataataaagtcatgcatcaaaacatttgtatttcttttatcaccagtcaacatcagctaattttcagatgacataattcaaatttttgtaagccagcctaaaatagaatatatttaggcttggtgctgattgtattagtattgattttattagcactaattttatatgccaccttttgccttcagtggttacttttgaagatgtgatgggggaatggaaaatgcttaatagaaaatgtcttcacttatctatttcataggttaatcattgatattgttttcttatcaaatgaatattaaaaatagcagcagtgaattcattcttgttattctgttgcttttttgttttcagcattaaaaatatatcagcaattatgatatgtctcatatagtcctaggctcataagcttgttggataatttatttggtagcattttgttcatttatttcagatagatagatttaacttttatatttaacttgtaacagcagaaattagataatcagactatttttatactagtaccacaaataaataatgtcacctgcaagcaactttctaaaatattgacttctagcattaaatgtcatgaaattatagtaactcagaaaatcaatagtgatcatttgctactagaaacaacagttatggctttaaataaatgaggatttttaccctgaaaaatctttttacttttgtcaatttctcattcagttgttatggtaattacatgcaggacatgagaatttgaatgagtggttgtgactttgggccacttaaaatttggtattgagtgagaaaaagcccaaataaggatgtttatataatatacgtaaacgattattcaggacattctggggcagcatctagatcactcaacaaggaatcaacattcttagtttctggagtaccactcctgaaagagcctagacttgatgtttattttgaaagtgatggtgacatatcgtaaaataaatggattcacatatttttgtgttctgtgttccagtccagctctgtaatggcagctgtgtgaacttggatatgttcctagctttctttatcatagtttcctcttttataaaataaagttaattactacctcacagaatgactgcaggaattaaatgagtgccggtgaataaaagatgttcaataaatgttaatatcctcagcagccaatatacaaaagtaatataaaatcttaatattttgacaaaaatttatttgacagaattattatatatctttatttgtgtaatattaattcctaatttttcttgtgaataagtaaataaaagacaggaggctatagtagttagctactgatatgtgacaaatcaccccaaaacgtagtgacttaaaacgttcatttatttagcttgtgattatatggtttagaaatttacactaggcttagctcagtgatttttttttgtcttagttgatcttatctacgttcattcatacaattcgcctgtgttatcggcaggttgtgcatccagggactatgcatctgtggattcacccaaccatgaatcaaaaataaatattgagaaataaaaattaaaaataacaatacaacaataacaaataatacaaataaaaaacaatataatctaacaactatttacatagcatttacattgtgttaggtattataagtaaactagagattatttaaagtatatgggaggatatatgcaaatactacttccttttttataagggacttgagcatccatggactttgttatcagcagggatcctggaaccaatccccagcagattctggggcaagagtgtgtatctcttctcagttgccaggttggctgagggtggctgggctagtttggcctctgctagacaacatgtctccactccagatgatctctcatcttccaacagttatcctggacttgtcctcaaggtgaaggcagggatccaaaaagaggaagcagaagcatataaagcctctttagcctccttgctcagaactagcttgcccccacctccatcaccaccatgttctactggccaaagccagtctcaaacccagcctagattcaaggagtaggaaaatagattccacctcctgatgagagaagctgcacggacacattgcctagggtgtaaatatatggagaggtgaaaaaaggggccattttataataaatctaacacaaatgatataaaattttattttaaattaacagtagagtagaaagattaaacagatttatcaactttacttcatttttttccttctcccatggcctaaaatataattcttaaagttaggtttatatagtgggacttgcagactgtgtcaaaacatattttgaatttgaaatggtagaaatactttatatgtaataggaaaatattattttaaaaatcttaattagaatgggaaaaaagaaacacaatatatcaaataattaaaccaaggaatggttttgtacttttacatagcaaaatgtacttattaactttatctaaactaaaactgatacaagaataaatggaaaaaacaagtcaaagttgaaatttttttttaggatttcatgattaaagcttcttggtgattatgcctattatttaaaactaatgcaagtatgttaaatactgctattataaatatagcactttcccttcatcactctaaagcaactgtctacatgttaccttacttcccgtgaattctgtcttggttcaccttgcagagttctactgaacatcagcgtgttatacaattgtttcctttaccctagtaacatgtaaactaaacttctacaatttttaggaaggacttacttgtttgatttgacagctgacttaaaaaataaagagaacagatggagcaaaataataactatgattttaaaaatcatagcaatttatctgtggccaatgataattggtatgggagtaaccatgccaactttcaattatccatggtagcaggcaattgggaaagagtgatggtaatcccacagccaagccagaggcttaatgctagtcattacagattgtgtattattttcctaattccttacagtgctcgtgaataactctaatttatgtgaaatatgtttaaccctctgttgttgcatcacttgctagtagttatagaaaaagtaaaatgtccagagagagagagaaagagagagaaataagaggagaataactataaagggctataatattttatgaacattagtcttttaaagtattattttaatgattgcataatatttcactatataaatacgtaatattttatgtgagcattcccttgttgttagaaatttaagaacatctgttaaatgtgttttcttatttgtgtcactggtgactttagcaaaataattttgatggaatagagagtagaagccaggttggagtttcctgaagagttaaattacaggtgaccgataaagaggccatgcagaaaaaccctcacgagaactagctgtgaagaggacaacagccataggacagtagctggagagggtgtgagtcatttaagaagactttattccaaaatccaaagccatcataaggtccttggcaggaaatattcttgaacaagttaggacccaaaagaaaaacacggactagttcactaatacagagaattccaaacgttttatacttcctaagaaatgtcagactttaggccatcatttttaaggaattcccactaaaatcaagactaagacaaaggtgtaactgctattatttaacaatattctggaatttctgaccaatgtcaattttacttccaaattatagtttaaatctgtctatttctctccatctaccccagtgtcaccaaaccgtaatcattagtcacctcctagttaatctccctgttctcactctttctcattcattttccaaattatggtcagatgcatctttacaaaactattcatgtggcttctattttaaaaacattttagttgtttcccattaggttaaaatcctgaatcccacaaggtcctgcaaagttggacgtagatgtgcttctcagaactcatctcttcccacattccccttttctgcttctattccagccacactgaccttctttcagttacttgaatgtgccaggcgctctcctgactcacagttgtccatcagtgtccccactgctttgaatattttccccttcatttagcttccctctatccacttagcacatcttaaaagtcattttcttggaggcttccttgactctccaatcaaaatctgctccttctgttataatttctcattgtacctttagcactatactgcacctgtatagcatttaccacaatttataattataaatatactggcatgaggattttgtttgtctgtttttctttctccaatagagtagaagcttcaagaaaacaacgaccatgtctgtctgtgtacgtttttatctctaacacctagttgaatgcctagcacacaaaagtattcaattaattcattctttactgtggggaagtattatagagaaagttaagtagtgtttcttttcagcctccagaagtatttaataattattatcttgatgcattcaattcagtatcaaccctatttttttcagactcctactattgaatttgtgagatatagctagggataaaaattaattttacatgtatggcccttagaattgtgtttaaaaagacaatatataaaatataaaacattaatatatttaatagtatgctaaaatttacacaggaaatattgtttaacctagtatatttccaatttttattatttgtgaatcacattgccttttggcaggcactatttagctcataattctataaaataaaatacagttcttttaataccagatattgcaatgtcttttgaatttagtagtaatgttaaaggttgtctactggctcctgtatcataattttactttccaattacagtggaattttgggctgttgactgtagtgaacctaggttagttttgttaaggaaatttattcactcaatattttatgtaatttaagtacaaataaatatgaaagtttggggtcacataagaaagaataaatagaaaaaccatgatcctcatttatgtaatgattaaggcaacttgacttttagtagtttctccttagtcagtgctgggtataaaagggtggttttacaatgtgcctacattttgcttttattttgacctttactccatttatcctatttcttcactccaggctctggagctgcctcaggtttctactcttagcttttggtcttccctttctcctttctcaggatctgcctgtgccatagactccacttcctctgctctctgctgggctccttgtcctcagctgctcattaatctcttcacccccactgctttctttttcatttgtttgacttacctcccatcaagcctgatttccacttcaggttactttctttcattttttcgcatatttttgtattcaaaaacaaggaatagatctcttaggcagtccctcaccacgactgaccctgagcatttctgaatgcagctgagtttaaattgagtaaaggcaactctcacatttgttatgaggtttatacacacagggtttttaatgtataaaaaaaagatgtgtttttttaaattaagaaaaacagaatagatttaaaaatcaagcaatttcttctgcttaatacaatcatcaaatatccataatttctaactgtttttagtaaatctcaattaataaatatgctttattaacaaaaatctcttttttggaagtacattccagatggtaaaaagataattaattcgatgtcaccaaatattacatgacaggtgtgttatttttattcaggagctaccggcatgtgaacttctttcacaatcaatgtaaaagcaattcactgtataggaattgctgaacaagtgtgtcctaccagaccgaaatagcagaattccactgcacagaaaacagaggtgttagtgcagctgctgttccaagtggatgttgtacagtgactagctgttttgtaagttattgtctaggcttatggtggtctattgcttcttagtctaatatcttaaaaaaaatcattggtttttattttccttgatatccttgatatttccttacaatctcctttaagaacctccccatcaatgatctgttctaatatcagtaaaggatcaatgaaacaagacagaaatcaaataatcaatttgctttgtcttttttcacttttccttattgttcctcattttctgctgctaatcattttgtgtaatcaaaactcaaggcaaaatggtaaagcgataatgctttgggcaaacattttgtggaatgttattttaattgcctgcacttgtccagccctggggaggagtgtggcaatgcagatggcttcagctggctgtattccaggaactcactgatagtgattctgcctcccacttaaggtttacttatgtgtacaaatgaatcatgcagttcatgtcttggtaagaactacaaggctggagcacatgatagcacccagtaatcacagagcgaatcaaggattcttccttaagttagtggaaagttaggaagttatctaaattgactttattcctttatccggattttgacaggtggcccaccattatcattaatgtttataacagacaattctaagttctttattttaagccaaaatttgttccgtattattttgaccaatctaatttatcccagttctaatctttcagaccagtgttttctctgattatatgttcttgcaaatgaatgactgaccatcttttggagagtttaagacagcttccttttttttttttttttttttttttgagacggagtcttgctctgttgcccaggctggagtgcagtggagcgatctaggctcactgcaagctccacctcccgagttcgcgccattttcctgcctcagcctcccgagtagctgggactacaggtgcctgccaccacacccggctaatttttttgtatttttagtggagacagggtttcaccatgctagccaggatggtgctgagctcctgacctcgtgatccacctgtctcggcctcccaaagtgctgggattataggcgtgagccaccgcacccagccaagacagcttcttaaactgtctcctaaacatgaagatgcattctcctgaacattttcatgtaagtatctcagttttgagcaagtgtttcactgtgcttcatggatcactgctaatggatcccttgtcttcctcataaccttcatcttgtaatgttataactcatcagtgtactgttagtgtaatgctcagacatggacagaattattctagcactttgagcagtcattcatataggcagtttaatataatgaaggcatttggattttgtggagctgagtcctcatcctggctcctggacagctcaagttatccatggctatttcaatgtcttcacctgtgaaagagacagtgaggctagattaggcctagaatcacacatgtttagagctagagtgaatctgagaatatatagagtttataatactgtcaggtggttgttttcttgagtcacaatataagcatttacatgtatacgtgctgcctttattctggggatttaagcctgatgtttctgtttgttaacgttaaacttttgattctggcaggtattacaatggtaaccttttatcagctctgtagacatgaattctaggtccttgaattttgtagatatgaattctaggccttgagtagctaatataaatattgaataagacatgaccagaacacagcactgtgacacaccactggagttctctttttaggggtgatggcctaatagaaatgaaggtagaatgagcgtatttatttaactacctattatttacctcactaaaatttaaccaacatttatcaaacacatcctaagaaactttattaaatgtcttactgaattaaataaaccaaactcataacacatggtttttgttttctgacatggtattgcctattgataatcatcttattcttaactaagagtttaaaaccaatttgtttaataattaaatctagaattttgctaggaatcagtatgaaacttactcatcattcatgtatattttttaaatgagcaagcattagtgtgtctaggcctttccttctccaagattctcagagattcatctcagtggctaatttccatgagctcttagttatctgcccttaatctgtcctctcctatcttaacgtctgtcttggtctcaagagtggttatctagaattaatgaattaaaaggccttcaatttattttcaaagtagtttgatgccgactataatccaatatgatactgtatccctttgaaacatatgctgggttttggaatatatttgtttattcaatcatccatttatttgatcatttaggacccattttttaccagatactgtgttcagcactagggtagcagatatgaaagagacaaaacatcctttcagagagtagatatgaaatgcttgatggtgttttgtataggacctgtgggaaggaagaggagtgagtacataacgctccctaggagaaggaggggagtttgattaagattctttagtgagtcctgaagcataggtaagagttctccagaacacggaagaggcaaatgaaacagttcattgtaaggtttagagtaagaacaaagtatgagatgtttaaggaaccacatggagtgtcttgagtgacaaaaagaaaaccagtgaccaccagagaaaaaaacaaaaggacttttaaaaaattcctgagtcatagtttcaggcaaaacactcaagggagacaattgccaggaaataacatcaagaggatgcctctgagcattcaggtgatgtcatgtttagctcactcttccctggtagggaataccacctgaccaaaagcttgagggaatcctcttactagaagacccatctgaagccgccagacaaaggattagaggctgatgtccctttgagtcagtgtggcgattcctcagggatctagaaccagaaataccgtttgacccagccatcccattactgggtatatactcaaaggattataaatcatgctgctataaagacacatgcgcacgtatgtttattgcggcactattcacaatagcaaacacttagaaccaacccaaatgtccaacaatgatagactggattaagaaaatgtagcgcatatacaccatgcaatactatgcagccataaaaaatgatgagttcatgtcctttgtagggacatggatgaagctggaaaccatcattctcagcaaactatctcaaggacaaaaagccaaacaccatatgttctcactcataggtgggagttgaacaatgagaacacatggacacagggaggggaacatcacacacccgggactgttgtggggtggggggaggggggaggggggagcgatagcattaggagatatacctgatgctaaatgacaagttaatgggtgcagcacaccaacatggcacatgtatacatatgtaacaaacctgcacattgtgcacatgtaccctaaaacttaaagtataataataataaacttaaaaaaaaaaaagaaaggttcaggctggcttaggtaacaatttaattaaactttttgcttggcatttcccaggaatttctgaaactttctatttttattattcttgcaatttatagaaactgaacatttcaatccagtggaggataatagatgtggcctctatctaggtttattttgctagttaagttcctgaagcaacttaatccaaatattttattttgtccttaattaagaaagaaaagaaagaacatgaaatgtagccatttctttcatgaatcaaacaagatttaatatttgatcatcaagaataagtggtaagtttcttgctttacctgctaataaatggccatggtcatattgaaaaaaaaaattttactgatctaaatttcaataatttactagccagaaacacagtctcttgctgtgatcttgctcctcaaattgtcacaagaatccccagagattctatatgtgttacctctgtgaactgatcagtatgtgagtcaacagcaggccttgctatcattccctcctgattcctgagaagaggagtaagaaatttcaggtataatttgagctggcacctgaaacttttgctatatctctagttaggttgaagtatagctgttgccagatacacgtatacatatagatacatatacatacatatatagagagagagaaagagagagaaagagagacagacacagagataaagagataatgttttgcattttatccaatagataattttttatacgttcatggaacagtttgaaaaatttatgattctttggacaaaaaaaataaaaaactcaccttaagttgaaaagtagacattttgtaagactcattccttgatataaagaataataaagaaaccaatacatgaagaaaacagtcctcaataaccccggaaccaaagagttaatgaaaaggaaaattcataaaaatcaatgcacaagaaaaatactttatataaaacatatggaccatatcaaaagctataatgaaggtgaaaatacatagtgtcaaatctggttattataaagaagaaaatataaaaataatgaaaatatgcttttatcttatataataataataaatagccccgaaacaaaatagtagatgggaattaataaatatggtcactaaaatcaatgaaacagaaaattttaaaaattgtagaagggacaaacaaatcaaacacctgatttaataaatgactaagaaaatgaatacacaaagaattaaattattctattaaggaaacagaaaatagaaaaaagacaagctagaaataagaaaaaaaaatgaccacagatagtagatggacttaaagaattctgagactattgttatatgtgtaatttgaaagaaacaaaaatttgatcacctagagaaaatggatgatttcctcaaaaaatataaaaaattgaccaagaataactggaaaatatgactacactaattactgtggaagaaattggagaggtgattcaaaatctaccattgaataaagcaccaggactaattgggtttttcagcagggttttatgtagccagtgttattttaactattctaggctaaaggaaagatccacagcctccaagaagtcagcataatgttaatactaaatctaattttttaaatataactatattttatttattgttatagatacaagtatttttaaataaatattaccaaacagaattcaaccattcagcaaaagaaaaatcaagtaggataatactatgaagtcaaggtggattcatgttaagaagttatatatatcaacataatacatcagccaattaaagcataaaagttaaatgattatatcagtagatgctgaagcttttgataatatgcaatattcattcctaataagatcttcaagtaaaataggaattgatgaaatatttttactaaaagccagcagcaaatactattcttaaaaagggcaaaaatagattagaaatgaaatatgcagaatttagacttaaggagataaaattgccataaccattacttcacaagaaaattaagtaacctatgtagcactagaaaaaagagataaactacctttttttactaatgagttgactctataggtagaaaatctaagagactttgggagaaaatttagaatttagataccagggatatatttaaaaaacaatagattttgtttattttagccttaaacatctaggaatgtaatgggaaatattccattaatataagtggtaaaagcaataagaattttggaaaaatatgaataagaaagggacaagatgtatacaaacaaaatcaaagggcgtaaaataaaatctaaatgaatgtatgtagatacaccattttctttaaaattataaccttaaaagttcagtaattcaaaattaatacgtaaatgtaatgcaatacaaacaggaattccaacatgttttaaattttgtcttgaagttggtaaaattttttaaagtttatatgaacaaataaataactaaaaatagtcaaaaattttttgagaaagagaaatgtagtaatttagaaatttagggtgaacttgctttaccagacatcataacattctataatgtcatagtaacaaaataaatattgcatcatgtagaataaagatagatagactaaacctgagaatctagaaactggcctcagaagttatgtgaagttaatttaataacttttgtatttttattcagttattcagttgaaaggatgggttattccacaggtgcattggcactaccgagtctatccacgaaaaactattttataccctatataaaaataaatgccagatagatgaaggacttatataaaaatcaaaacaaagcaataaatactttacatttgtgtaatccaggattaagtgtatatctaaccaagatttgaaacccagggactgtaaagtaaaagatagacatattagacatataaaaattaaatgtttcagtggtaaagtcataatcgaaatcaagtaggaaataattgttctgataaaatataattaataggtgaccagttaacatttgtacgttccaaagagtttttaaaagctgagaaaagacaactcaatatttgaaaatggacaaaatgtgtgaataggcagctcgctaaagagaaaaattctaatgctagtaaacatgtgtaaggctcagattcactggtagtcagtgatatgtaatgtaaagcaattatgagatttggctttacagccattagcctgccacctgttgctggatgtgattcaaggacaaaggcattcccatacattgctggtggtaagtgtagagctacagtctcttttagaaagcaactgggtaatatctattcaaaaatgaaaaaaatgcataatctttttacctagaaatcaccttcttgaaaatctgacttatataaatatattacatgcatgtgatggcctttattttttaagtggtataagctttaatacaactcctaacacaaattctgttaaattcaaacatttgctgggttcctagaacagtgctcacagagttggcacacaaatgttataacatagtattacttgttaggtatacaaaaaacaaaccatacagagtttttgccaatgtggaatataatggtgttttgtaggggcagaaaactggaactgagtgagtgtcattaacaagaaaacacctgaatacattatggaacatctatatcatagagtattatagaactactgaataaattaggattctgctgggtaatctaaattgatatgtagaatgtgatgatgagggagaaaataaaaaatgcagaaaaatgtatataatataaccaatttttaaaacaaaagtgattaaaatcctgattgtgcctgtatgtatgtgtgcatctattgtaacttatgatgacataagtttggagtaaaaatttggaaaaatacttacaaacttaaaagttaataacaaaagtctggcatccagaaaaggagtaaaagaaattaaaaagtgagaggagagtatgatttattgtcttacttcagaacttacattatattatatatattcttcatatttaaaaaaacatttaacattcataaattttgtatgtgttttatatttataaacttttaaatttataaatgttatattcataaaatataggtataaatatatatcacattacatacatagatacatgcattgcatatgttcccttgcccatgccaagtcttgcaaagaaaacattttaaaatctgtcctaaaatatatgtttcatgtatttaaggatttatataaaattacaaatatattttaggtaattttttaatttcaagaaaagcacaagagaaatggattaaagataggaaaagcagcaaagtagctgctacaataatacacaaatgaaatgaccaaggagcatgacaaacataatgccaggattgttgccatcattgttgccatcatagcaatgacaatgtgaggatcatggtggaagcagcagcaatttaagaacaaaaatgaagatatagaaagaaaaaaagagggggagttaagaagaataattctgttctgatgcattggtctatttgtctacacttttttatttttattttcattttttgagatggagtcttgctctgtctcccaggctggagtgcagtggcacagtctcagctcactgctacctctgtctcccaggctggagtgcagtggcacagtctcagctcactgctacctccgcctcccaggtcaagcgattttcctgcctcagcctccccagtagctaggattacaggcacctgccgccacacccgactaatttttgcatttttagtggagatggggtttcactatgttggccaggctggtcttgaactcctgacctcgtgatccacctgcctcggcctcccacagtgctgggattacaggggtgagccactgcacctggcctacacttttaacaatacaatattgccaaaatattatagctgatgtttatagtgagtatttagtagggaaaattcctcaccaggctctttaagattatcttgggtatcctagaaccttggcattttcatatcaattttaaaatcaacatgcccggccaggagcagtggctcacgcctgtaatcccagcactttgggaggccgagacgggcagatcacgacgtcaggagatcgagaccatcctagccaacacagtgaaaccccgtctctactaaaaatacaaaaaattagccgggcttggtggtgggcgcctgtagtcccagctactcaggaggctgaggcaggagaatggcgtgaacccgggaggcagagcttgcagtgagccaagatcttgccactgcaccccagcctgagcaacagagcgagactctgtctcaaaaataaataaataaataaataaataaataaataaataaataaataaatataaaataaaatcaacatgccaatttccacacttacatacacacaacttgctgagattttgaatgaattttctttcaatctatagatgtttgggaggaatttaccttgcaatagtatagagtcatccaatccataatatatctatttatttaggtttcctgtattgcctgtaagtaatgtattttaattttcactgtagagttcttacataattttcgttagatttatgactaggtatttgacgtttttgatgctattttgaatacttttaaattttaacttccaattgcttctagtatatcaaaatacattgatttttgtttattgacctgtgtctggccaccttgctttattaactaattaattctaatagttcacagactaccatgcaatttgtgaataaatttctacttctctttacaaatcttatttcttggattttttttcttgccatattttactgactaggacctccactacaatattgaaaagaagtggttatagtgtacattcttgttctttttctaaatttaaggggaaagaattcaatattttatcactaagtatgctgtaggcttttgtagagaccctttcttagaatatgaatattgagaatataatttgctgaattttctttgaatactattcaaatattgaacttaaaaatgctttttccacatctgatgagatggtaatataattttctttctattctgttaatgtggtgaattataatgattgattttcaaatgctaaactacccttggattcctagaataaaattcatttgttaagaatgcataattttttctgtgtataagtggattcaatttgctactatcatgattaggatttttgcacctatgtttataaaaatttaagatttttttttctggtcattttctggtcaaactttgctatcagagttatgctaggatcataaaatgagttgaatactgaataaccccttttcttgtttccagaaggagtatgtgtaatatctgtattaatgtttccttaagtgtttttaagaattcaccaaaaagccacagggtctgaaggtttctttgtgaaagatttttacattatgggtttaattatttattttgattgctttgtttatgtttctcctgaaaatttgaaatttttgctccagtggttataaggagaactacataaaatatagtgaagtttctatttctgcagtcagtgtctattgatttccttccctagaatggctgaattaacatatttccacttcttccatccctgccactctctgatgtcaatgaatgacatatttttagttttaccttggtattgttaatatgcttatctttgttacgtattttggttttaaaggcaacttaagttgattttaaagacaatcttttaacacctcactacaaaagataatggacttaaactacccattattgccaccctctttcctctccttccttctaatttttgtcagatatataattttagcattttttggtattcataatatttacatcctgttcttaagtcgcaagccctaatttttatcttatttttagtcttgtagctaaatgaaacctatgttcattgtcaatcttttgcctgaagtttctgtatcattctcttggttggctgatgtttgcctcctagttttttcacaaaaagttaatgagaaatatatatgcgaaggacatggaagtcccccaaactttgctttcactttatactttaatgacaatttagctgtgtttatagttcttgaaagattatttgtttccttggggacattttagccattagtcttctatcattgagtgtttgaatgttgctcgggagttatctgagattagccagcctaaaacctatttccataggagattgataattttcttcattttaaagaaataattaatgcaaatgtaataaccaaatgtgtaatttaagagctgcatttaagaactggtaacatttgaagaaaaaacattaggtttaatttgggtaggttcaaaatgtctccctacccacttgtagttgggatcagaatacaaagtacacctcaaaacatgtcttttaagggaagaattgtttccttgggtaagataaaacttgaaactgaattcctcactattgaaattttaatagtacaaggttaaaaatggcattcaatatgagttttgttgtgtgggatggttttggaatctttaactgaataattccatttgtttaagtagtgaggtactaactttcagaggaagagactttaagagaatcagttgaaaatgactaatgccaaacatgaaagcagcatcatcatttctttactcattcctcagaagagaaacacccttactgccatccagaggtctatggtccagtggcgagttcagcaacattagcaaagggggtgaaggatgagagatgactcagagacttttcagtcaggtctattgaagagatagcttaatcaggaaaattaggaccactttaaaatgagtatcaagagtggaaagtagagacatgctaataagaagataggacttctgaaaaaaaaagtagctgagtatatatgcaaacagccaggaccctggaacctaagtttccttcaccattactgaacgttttcaaaaattccttaaacttctatttctttgtctaaaaaactgtgaaaattttccttatttcaaaactttgctcagaaatgtctctcctgagagtctttgaaagtttagggcatttaaaaatgcatattattaattttactgagttaatagccattatagtctagtagtgtgtgtaatatatatcaggggacatcttaaaaggcatattatcataaaatgcatatttaaggactttccacctacataaattgaacttaatagattataacaagtctagtgggcccattagggtctttggaaaatacagttcagggccttgttaaaacatatattcttcatgtcatattctacttaaggagcttgcttcagtaacctagaatttgaatatgtttgtcttgcttagtcatgaaaaatgaaaataaagaactctttctttttcagtaagacagtctacaaagtcaggaagaaagcaaattttgccgctaattacattgtttttagtttcaaataacatacatagaaaagtgtcaattaaaataatagctgccagtaaaatgttaaatgacttacacgttttatatatatatatatatatatatatatatatacacacacacatatatatatattaatcctccttttataagtcagaaatgtgagggattatatgtttcagtttaagctgaggttattgattgttagttaccaatggatatacttcaatgagaagcattgggtataaattatgtccagtgtttctcataacgtgatctgaaaaaccacctacatcacaatctcgtgggtgcttaaaatgcctgtttctgagcctcattcctgatcccctggatcagaagtctaggcatgtgccttgggaatttgcattttaataaactctcttagagatggttgcataacaactaaagtttgagagcagttattttaatgtgcaaacctatacacataatgtactaaatatgtgaagccctatctagaacgaacttctgggcatatatactttgaccgcagagtttatactacaattccttaaactttcttcaagtaatgcttattttgaaaccagttctggtctccagtgcccaacttggtcttatttagaaagccactgagctttctggctctaagactgagacatggagctctaactttgtagctgcaattggaaaatgcattaataagatatttgagtgcaattgcccattagaaattctatttctaagattttggatactttttgtattttgtttcattttgtgttgtgttgtgttgtgttgtttgagacagtctcactctgtcacccgggctggagtgcagcagagaaaacacagctcactgcagccttgacctcttgggctcaagagatcctcccacctcagcctcccgagtagctgggactacaggcatgacttttgatattccttaaaaatctttttttgttgttgttcaaaatcaagaggcatcatcccaaaggtgtccactcaaggcctatggatattcagcaatgataactgactcttatctgcagcacatcactagctacaccaacacaaaacaaaacacagcaaaataaaatccttctgtcatgttcatttatcctacagtcttcctcaaagtggaattataaaaaatggaattttattatttactaataactctatgtctaaatttgtttttcctgttttctcattttacaagtgcaaacattatcctcttgactcagtgaaaattagacttattcttgacccagacatacggctatactgaaggaaaattcatcattggctactgagaaggatcaactctgatagctgaaataaatttgaaacaaatctcacactagagacttgaaagtccttaaaacgattgcttggtttcacaaacaacactgtgtttttaacatatagaatcggctagaggtccttatgtgcttgtgaaattttccaaatgtgaaagacataagcaccaccgtttgtatcacagctctttctttcactggcttctaggacttgaatctaacaaaatacctcccagctgtgcttaactgccttgtggggttggttcttgattgttggtaaggattccctgccatgcttacttgggagcctcctaacattcttccttctcctggagagagcccctaatggaatggagttcttaataccagaaaattgcctagaaaatttactcaagtagtgggctttctcaacccagggttacagtaaaagggaaatgtgaaaagtttagaattaagtatgaacatctagttctgacatgggaggaataaactgagtacagcatgtaagaaagataattatttggacccttaaagctttaaaccaaatactctgactcatacaggttctggaaaagactcaaaaatggttcactattgaccctgctgtaagaaacagatctttattttgttttttaaagaagttttaaacaccagattcgaaatgacttaaatatgcaaaagtgcagcattattaccattttctttccccattcttatatgttcattctctaactgcagcctcatcagtggtttactacaccaaaggcagtgaaaaggttacatgtcatttcctgtactcctcatattcactagatttgactataaattccatagtgaattacagcaccaccattattaaagtaatataggccaaaagataagcattacttagtgtgcttagtgcttaggattttgcatgaagtatctgaaaagggtcttctgccctccaccatatgtgggcttttaatagttggcttttccttattagttcccagatgagaaattaataaaacaaatgatcgttgctactgataaataaatgctataccggaatcatttgggaaatcactactgcttatgaaaagacttctagcacctcttatacctttccatgtatcagacaagaaagtttactgagttctgtgctagatgctctggtggaataaaaaggaactagaaaacaacacccacgtgttaagagactgataataccgttggagattcaaaacaaacctcttcccctcctccctcagcagtctcaacttgtcttatcagttcaatcatcatctctcaagaggatggttcctaaatctataacctaaacctgatatctttcctggagtctggtctactttacccaactacctgttagacatctcctcctggatgtcccatttattcctttggttcagcatgttcaaaacaaaacccttctgctttcctttcacatctgcttttcttcctgcatttgctcttttctatttgtgctgataacatcaccatccttctgggctttgcacaggtctgaaacctgtaatttttatgaactcttgcttctcccctcttttcctgtcacatctcatttctcatagccgcccttctttttcagccccatggcatttccctaagttctggctttccttgcctttgcctagattgttggaataggtttctaagtaaattacataccgctaagttttttacccactaattttttcctacataactagctccattactctccaaaaagtacaatgccggggttctactcaaaaagagtcagtgcctcctcaatggctaaaagagcatgtccagacatccctaacttgcccttcgtggtttctacaacctgattctgcctgcctttccaatttagtttcatagaattttcctttttcggaatcctgtgctttacctaaagcaagtaacttgctaatccatatatttgtgccttttcttttacttttcccttgttctagaataacgtccctctatttcttttgatgtagatcaagcttgtcccaaccacggcctagaacagctttgaatgtgactcaacacaaattcgtaaactaacataatgagagttttttacttttttttttttttttgctcatcagctattgttagtgttagtgtattttatgtgtggcccaagataattcttcttccaatgtggcccagggaaggcaaaagattggacaccactgatctagatcctacctaaaacatggaaacttgctcaatagccacagaattagactaaaatttaagagccaatttctagaacagaatggtctaggttcaaaccctggctctcccactttactatgtcaaaatactttaccttcctctactttagtttcctcatctctaaagcagagtagtagtacctaatccctagtgctatgatgaggtaaatgagttaaagctcttagactaatgtttcatgtctataagatcttatataaatgctagacttcaattgtgaatgagtaatttttgccttcatttctagagctttatcttgttaagaaaattctcattgcatatcaaaaagcttaataatgaatgtgtacaaatgatgtatctctttatttgtgagcatgtgaagtacccacttataaagactctggtcctaggcataataaaaaattgttagtatggacaatttcaaataaacacaaaagtgtgcagaataaaatattgaacacctgtatatacttcagctgtcttcaattcacagccaatcttgtttcacttagactccatcttgtattattttgaggcaatcccagtcagcatatgtttcagctattaacagttcagtctgtatctgtaaatgataaggcttttgtttttacataatcattatttcattataacacttaaaatttttaaacataactttttaatatcattaagtagtcatttggtgttcaaatttccaatagtatcataaaatcataattttcgttaacaatttgctgtagtcaggatccaaataagataggcacattctagttggttgctgtgcttttgatggtctcttgatctataattttcctccccctctctgtcattttgtttgttttattacattatttgttaaagaatcggggttgtttgtcctgaagaatcttccatagcctggatttgccaactgcagtttcatggtgtactttaatatgttcctctctcctctgtgtttcctttaaagggtggttagatcagtttaggtgtgatgtttttagcaagactacttcataaattgtatggtggtgtgtgccaagagccacataatgtctgaaaatctttctttttgtgatgattgcagccattgatcatcaatatctaggccaattaattcattcagggtcacaaaatggtgatttcttaaaaggatttattcaattttaactttttcttcctttttctgacttctattttaggtttggggggtacatggcaggtttgttacatgagtaaattgtgtgtcacaggggtttggtgtacagattattttgtgacccaggtaatcagcctaatacctgatagatagttttgttattctgatcctcctcccactctctatcctcaagtagaccttggtgtctgttattcccttttttgggtctatgtgtactcagtgtttggctcccactaataagtgagaatgtgcagtatttggttttatgttcctatgttaattcacttaggataatggactctagctccatccatgttgctgcaaagggcatgatctcattcttttttataactgtgtagtattccatggtgtgtatgtagctcattttctttatccagtccacttggatgggcagttaggttgattccatgtctttgctattgtgaatactgctgtgatgaatatatgcatgcatgtgtctttatgatagaataatttatattcctttaagtatatacccagtaatgagattgctgggtctaatggtagtttgtgttctctgagaaatctccaaactgcttttcacagtggctgaaatagtttacattcttaccagcagtgtataaacatttccttttatctgcaaccttgccaacatctgttattttttgacattttaataatagccatcctgattggtgtgagatggtttcttattatggttttgatttacatctctctgatgatgagtggtgttgagcattttttaatatgcttgttggcctcatgtatgtattcttttaagaagtgtcctgttcacgtcttttgcccattttttaatggggttatttggtatttacttgtccacttgtttaactttcttatagattccgggtcttagacttttgtcagctgcatagtttacaaatattttctcccattctgtatgttgtctgtttactctgtgaatagtattttttgtttgttttttgctgtgcagaggctgtttagtttaattagatcatatttgtcaatttctgttttcattacaattgcttttgtcatcttcatcatgaaatctttgccagggctgatgtctagaatggtattttctaggttatcttccagggtttttacagttttaggttttatatttaagtctttaattcatcttaagttgatttttatatatggtgaaaggaaagggtccagtttcaatcttctgcatatggctagccagttatgccagcatcatttattgaatgagtcctttccccattgcttgttttcgtaagccttgtcgaaaatcagatggttgtaggtatgcatctttatttctgggttctctaacctgttccgttggtctatgtgcttgtttttgtaccagtgccatactgaacttgtagtatagtttgaagtcaggaagtgtgatgcctccaactttgttctttttgcctaggattgctttggctaccaaggctcttttttggttccatatgaattttagaatgtttttctctaattctgtgaaaaatgttgttagtagtttcattttgcacttgtatacaagaacttaaagtaaaatttaaaaaaagaaaaaaaaatgttgttagtagtttgatagaaatagcattgaatctataaattgctttgggtaatatggctattttaacaatattgattttttctattcatgagcgtggaatgtttttccatttgtctgtgtcatctctaatttctttcagtagtgtttggtaattctcattgtagagatctttcacttccctggttggccctattcccaggtattttattctttttgttgctactctgaaagggacagtgttctcgatttggctctcagcttggacattgttgatctatgggaatgctactgatttttgtacattgattttgtatcctgaaactttactgaagttgtttctgagatctaggagcatttgggcagagattatggggttttctaggtaaaaaatcatatcttctgtggtgagagctagtttgacttcttctctttctatttggatgtattttatttctttctcttgcctgattgctctggctaggacttccaatactgcgttgaatgggagcgatgagagaggccatccttgtcttgttccagttctcaaggagaatgcttccagcttttgcccattcggtataatgttggctgtgggtttttgtcatagatgactcttattattttgaggtatgttccttaaatgcctagtttgttgaggattttaaacatgaagggaagtttaattttattataagcctttccttcatctattaagatgatcatgtggtttttgtgcttagtcctgtttatgtgatgaatcacatttagtgatttgcataggttgaaccaatcttgcttcccaggaataaagcctacttgatcatggatgattagctttttgatgtgctgttggatttggtttgctaatattttgttgagaatttttgtgtctatgttcttcaaggatattgacttgaaattttctttttaaattgtatctatgccaggttttggtatcaggatgatgctggcctcataggatgagttagggaggggtccctccaccttagttttttgaagtagtttcagtaggattggtaccaactcttctttatttgtctagtagaattggctgtggatctacctggcccagggcttttactagttggtaagcttttcattactgattccatttcagaactcattattggtctgttcagggtttcaatttctttctggttcaatcttgggaggttgtctgtttctaggagtttacctatttcttctagattttctagtttgtgtgcctagaggtgtttatagtagtctctgagggatttttgtatttctgtggagtcagtggttacgtcccttttgtcatttctgattgtttatttggatcttctctctttttttattagtctagctagtggtctatcaatcttatttattctttcaaaaagccagcttttggttttgttgatcttttgtatgtttttttttgcatctctatttcctttagttcatctcttattttggttatttcttgtcttctgctagctttggggttggactgctcttgtttttcaagttcctctaggtgtgatgtttgtttgttaatttgagatttttctagctttattatgtgggtatttagcactatacattttcccctttacaaaagtaaataacatatatggatagtttgtaaacatcttctcaggcagcaactcaaaataatgtggagatagatgataatgatattatgaagtcaagtttattaataaggaatctgaagctccaaaaagttgtgattttaatgatgttaaattcctagctcttttcatcttgttcactctaattgagtgagaatttttagaaagtttatagaagtattaatgcccaagcaaataaagaagaaaatgctctaatccatgtatcctggtcaaacaaggaacgagttaaagacagcaatgagagtagtgagtcattggacctagtggaggtttgcctatgacgcttgtggagaatttctttctagatctgtcattctcactggattcccaggcaacagctgtgacagactaaattgtctctctcagatgagtataaaatttcatcttccttcctcatcagcaaaatgaaatgaaatggagaattttggaaatggcctgaaatattattgcagacattgctataatttggaaattgtcacatgagtacacagaagatttggcagtttcaagaattcattctggatgtggcaccagttccaaatcagcctatgagaccattatttaaaatgccatcactgtattttaccccagatgattcctgatgatattttattcaggagacatttgtgggagatctgctgtgtgcctctatccatttgcatctgagaagaggaagaccagcctaatgattttcagaaatgagcctatgttagcatatctgaccctgcccacggtgtccccacatcctcagacatcaccttaggcctggcttcaccaaagaggcaccttctagttttatctctctacccaggactttttattcctttgtggactcccttcctttgaaaatcaaatgttctctctctcacatacacactctctctttctttctcttaagactcagctaatctgaaaataacttgccccattatttgtcattcgaaatgtagtacccacaagttaaacaaggtgggagggtgagttgtggcatgccaccttgccaacatgttccattgggaccatttctatggatgcattagtttactgccaggtgttagtatttatagaagttatggcaacagttctatgaatgtctcctttatccctctaccacaaaataagcttctaagaagtctggaaattctgagagtatattagccaatgtgagtgatcactatctaatagtatattttccaaaagcctagctttctaaaagagagtcttgaattttagactgtcatacaaatgtcagttaggtagctttcctgccatagcaattagccaagttaactaggtagccaagacaaggataacttgatgatagatggtttgatttaagtaaaaccgtgtgatttttttttttttttaccaaaagcatgctctgggtaagttagcaaatcaaagcaaagactatgtctttctatctggaattccaacaaccatctaaattctttaattatacagataattttgcatttaaaatttttgaagtagtggactattaactagatcttagaaatggtttgtgaaacttcaataaaagtgtttcttgaaagaagatttgattctcatatatgaaatatgaaccaagttaaatgtacaatctattgatacctacatttgtagttactaaagggaattgagataagctgattttatagagttatttcgttagattaagtcctttctctccttggagaaataacttaattaggtatatgtcacaaatgcaattaggtgaggaatcttggccctaattcatttagttgaaagaattacgaacaatttgtgacatagcaagtaggtttttatcaagacagtctttttgagatcagctattcaaaaagcaggggcactggactctgaacacaaatttatctcaaactttatctcgattcatctttgtggcctgatgaggtcatcatttgaaaagaatctaggtgaatataatttataatacagtaccttacctataaattcttctttatctcagtattgacacaatactattcaggtggctttaggagttatttgcttctatctgttaaaaatcacaaaggataataatagaaaaagacatgtatattcggacagctatagaggcagacatgtgattagaatcggacctcctgtttccaagcactagactcaggtcactagatcacaattacagctttatgctttggcttggcagttttgaaaagctcttatttttcttagccttatatttgactgccagagacataatcatttctttaccactcatcatgaacaacaaagcactaaattagtatctagtgttaagatggtaagctacaggtatatttaagttaggaaagaatttcttatttggaaaaagaagttatattttgtaacttcctttgtttaactaatttatataggcaggttagtagtacactatacatgtatttttttaatgtttaaatttaaaacatttaggcaaaggagttttgtctaaaataatattccttagcttactgattcttaataattaatcaaaaccaatatattttaatgatttacattactgaaaaactgtaacataagcttatttaaaacctttaaaaaactataacaagcttatttaaaacctttaaaaactacaacataagcttatttacaacctttaaatagagtctgtaaaacagtacattcagtgaaatctagttttattcctattcttctaccttgttagactgtacataatctctctctcaaaaagacttgtgtgtgtgtgtgtgtgtgtgtatatatatgtatgtacatatatagtatgtgtacatatatgtatgtgtacgtatgtgtgtgtgtgtttatatatacatatatatatatagagagagagagagagagagagaaagagaaccaaaagagaatctaacagagtagaaaaaggagaaggatcactgggaaacttaatgcatatgtgggggatatcaaataagcccagcaaaaagaaaaagcaaagaagccttgagaaaggactgcaacattgaatgccttctccaacccacccacagattgatcagaagtggatggaagccttatggacttgaggtgctatcacagcttctgtccaaacaactagacaatgattaggttatttggacacaggggtgatcccaacaaagccagtttaaaaataaaaataaagagaaaaatgggccggatgtggtggctcacgcctgtaatcccaacagaagctgactctgagagggccagggtctcagatactgaatttagcaaagactttacagaaatattgtaaatctgttcaaggaattagagaaaactctgttcaaataattaagtgaaaatatgacaattactcaatctcagtagagaaacagacatcataaaggaaccaaatggaaattctagagtttcagagtacaataatccaaatgaaaaatttactagctagactcacagtagatttgaggtggcagaaggaaaaatcagtgaacttaaatatggataaattgaaatgatctaaagaaagacgagaaagaaaaataataatgaaaaatgaacagagccacaacattctgtgagacgacatcaagcataccaacatgtatgtaatgggaatcccaggagaaaggaagagagagataaataagagagaagcaagagccaaacacttctgaaatttgatgaaaactattaatttatagatgaaactttagagaactccaagtagaataaacacaaagagaaccacgtttagacacatcataatcaaactgctaaaagccaaaaaaaacagtaaattttaaaagcaataacagaaaaacaattcatcatgtacgtgaaaacacaataagaatatagcaatttcagaaagaatggagacaaaaaggccttagaatgacatactcaaagtgcaaaaataaaaaagagattgtcaactatgaattctgtcttcaatgaaactatcaaagatgaaagcaaaaatgaagacattttgaagcaacaaagtataaaatgaattccttgctagcataaatgaactataagagttgctaaagaagtcccacatgcaaatacattataacagacaattttattttttgcaacacaatttatttatttatttatttattttcccctttccccacaatttattttttaatgttttcattatttcacatagaaacttcatccctttagccaggcttggtgtctcatgcctgcagttctagcactttgggaggccaaggtgggcggatcacctgagatcaggagttcgagaccagcctgaccaatggtgaaaccccatctctaataaaaattttaaaaaaactaaccgagcatgatggtgcatacctgtaatcccagcaactcaggaggctgcagcaggagaattgcatgaaccgggaagtggacgttgcagtaagccgagatcactccactgcactctattctgggtgacagaacgagactccctctcaaaaaaaaaaaaaaaaaaagacagaaaaaagaaatttcattcattagaaagtaattcatcattcctacctcctctcacaccttagttccctcattttattgtgaaaatattcaagcatatacagaaagattgaaagaattgtacagtgaacactcatatattcatcactattctacaatattttgctgtatttgttttatcacatccatacatctatccatctctttgttatgtacttcaaagttgcagacatgagtacgtttcacttctaaaatgttaacatgcataacattaattagagtttatgtttatctttttttttttgagactgagtctcactcatgattttggctcactgcaacctctgcctcccgggttcaagtgattctcctgtctcagcctcccgagtagctgggatcacaggtgcacaccaccacactcggataattgttctatttttagtagagatggggtttcaccatgttggtcaggctggtctcaaacacctgacctcatgatctgcccacctcggcctcccaaagtgctgggattacaggcgtgagccaccatgcccggccttcttttttaattgctaaaattaaaaagaccaggtgtagtggctcacgcctgtaatcccagcactttgggaggccaaggcaggaggccacttgaacccaggaattcaagacaaacctaggcatcaaggtgagaccctgtctctacaaaaaaattttttttaaatagctagatgtcatggtgcatgcctgtggtcccaactacttggaaggctgaggctgaagcatcacttgagcccaggaggtcaaggctgcagtgacctgtgatcgtatcattgcactccagcctgagcaacagagtgacaccctgtctcataaaaaaattttttttgattacatttaaaaacctttttagaaacagggtgtcattataacagacaataatttgaattaagaggaagggatggaatgaagaaataaagagcactgaaatttgtaaatacattgggtcaatataaagcattctacatcgtcatcaacaacaaagcactaaattagtatctaatgtaagctctgttaagatggtaagctacaggtatctttaagttagaaaagaatttcttatttggaaaagaacagttacgttgtgtaacttcctttgtttaactaatttatatatgcaggttagtagtacactatatatgtatttttttaattttaaaatttatttttaagttttacttaagtttcaggatacatgtacagtacagaatgtacaggtttgttacataggtatacgtgtgtcatggtggtttgctgcgcctactgacacatcctttaagttccctcccctcaccctccatccctcaacagcccctggccctggtgtgtgttgttcccctccctgtgtccattgttctcattgctcaactcccacttaggagtgagaacatgcagtgtttggttttctgttcctgtgttagtgtgctgagaatgatggtttccggcttcatccatgtccctgcaaaggacatgatctcattcctttttatggctgcatagtattccatggtgtatatgtacaacattttctttattcagtctatcattgatgggcatttgggttggttccatcactttgctactgtaagtagtgctgcaataaacatacgtgtacatgtgtctttatagcagaatgatttatattcctttgggtatatacccagtaatgggattgctgggtcaagtggtatttcttgttctagatccttgaggaaatgccacaccatcttccacaatggttgaactaatttacattcccaccaacagtgtaaaagcattcctatttctccacagcctcaccagcatctgatgtttcttgactttttaataattgccattctgactggcatgagatagtatctcattgtggttttgatttgcatttctctaatgatcggtgatgttgagcttttttcgtatgtttgttgcccacataaacgtcttcttttgagaagtgtctgttcatatcctttgcccactttttgatggggttgtttgctttttttcttgtatatttgtttaagttcattgtaaattctggatattagacctttgtcacatgggtagattgaaaaaattttctcccaactataggttgcctgttcactctgatgatagtttctctggctgtgcagaagctctttagtataattatatcccatttgttaattttggcttttgttgcaattgcttttggtgttttcatcatgaagtctttgcccatgcctatgtcctgaagggtactgcctaggttttcttctagggtttttatgtttttgggttttacatttaagtctttaatccatcttgagttaatttttgtataaggtgtaagaaaggggtccaatttcagttttctgggtatggctagccagttttcccagcatcatttattgaataggagattctttccccattacttgtttttgtcaagtttgtcgaagatcagattgttgtacatgtatggtcttatttctgaagtctctgttctgttccattagtctatatgtccgttttggtaccagtatcatgctgttttggttactgtagctttgtagtatagtttgaagtcaggtagcgtgatgcctccagctttgttctttttgcttaggattgtcttggctatatggggtattctttgattccataagaaatttaaaatagctttttctaattctgtgaagaatgtcaatggtagtttgataggaatagcgctggatctacaaattgttttggtcagtatggccattttcacgatattgattcttcctatccataagcatggaatgtttttccatttgtttgtgttgtctcttatttccttaagcagtggtttgtagttctccttgaagaggtcctttatatcccgttagctgtattcctaggtattttcttctctttgtaacgattgtgaatgggagttaattcatgatttggctctctacttgcctgttgttgttgtaaaggaatgcttgtgatttttgcacattgattttgtaccctgagaatttgctgaagtggcttattggcttaaggagtttttgcgctgagatgatggggttttctaaatatgaaatcatgtcatctgcaaacagaaaatttgacttcctctcttcctatttgaataccctttatttctttctgttgcctgattgccctggccaaaatttctgatactatgttgaataggagttgtgagagagggcatctgtgtcttgtgcctgttttcaaagggaatgcttccagcttttgcccattcattatgatattggatgtgggtttatcataaatagctcttattattttgaggtgtgttccatcaataactagtttattgagggtttttaacatgaaggatgttgaattttatcaaaagccatttctgcatatatagagataatcatgtggtttttgtctttggttctgtttatgtgatggatttcatttattgatttgcacatgttgaaccagccttgcatcccagggacgaagccaacttgatcatggtggatacgttttttgatgtgctgctggattcggtttgccagtattttgttgaggattttgacattgatgttcatcagggatattggccttaagttttctttttttgttgttgtgtctctgcccagttttggtatcaggaagatgctgacttcataaaatgagttagagaggagtccctctttttcagtttcagaaggaatggtaccagctcctccttatacccctggtagaatttagctgtgaatccgtctggtcctgggctttttttttggttggcaggctattaattactgcctcagtttcagaacttgttattggtctattcatggtctattcatcctggtttagtcttgaaagggtgttttttaaaatatatttatatatatatatatctatttcttctagattttctagtttatttgtgtagaggtgtttatagtattctctggtggtagtttgtatttctgtgggggtcagtggtgatatcccctttgtcactttttattgtgtctatttaattcttctctcttttcttctttattagtctagctagtgatctatccatgttgttgttggtttttttttttttttcctcaaaaaagcagcacctggattcattgattttttggagggtttttcgtgtctctatctccttcaattctgctctgattttagttatttcttgtcttctactagcttttggattagtttgcttttgcctctctagctcttttaattgtgatgttagggtgtcaatttgagatctttctagctgtcttatgtgagcattaggtgttatataaatttccctcttaacactattttagccgtgtcccatagattctggtaagttttctctttgtttttattggtttcaaagaacttgatttctgccttaatttcattatttacccagaagtcattcagaggaggttgttcaatttccatgtaattgtgtggttttgagtttcttaatcctgagttcaaacttgcttgcactgagagactgtttgttatgatttcagttcttttgcatttgctgaggagtgttttacttccaattatgtggttgattttagaataagtgccatgtggcactgagaagaaagtatattctgttgatttggggtggggagttctgtagatatctattaggtccacttgatccagagctgagttcaagtcctgaatatcctttttaatttcctgttttattgatctgtctaatattgacagtggggtgttaaagtctcccactattattgtgtgggagtctaagtctcttttgtatgtctctaagaactcgttttatgaatctgcgtgctcctgtattgggtgcatatatatttagaatagttagctcttcttgctgacttgttccctttgccattatgtaatgcccttctttgtcttttttttttaatcgtagttggtttaaagtctgttttgtcagactaggattgcaaccctttctttttgttgcttgccatttgcttagtaaattttcctccatcactttattttgagcctttgtgtatctttgcatgtgagatgggtctcctgaatacagcacagcaatgggtcttgactctatccaatttgccagtctgtgtcttttaattaggtcatttagcccctttacatttaacgttagtattgttatgtgtgaatttgattctttcatcatgatgctatctggttattttgcacattagttgatgcaatttcttcatagtgtcattggtctttatattttggtgtgtttttgcagtggctggtaccagattttcttttccatattcaatgcttctttcaggagctcttgcaaggcagacctggtggtaacacaatccctcagcatttgcttgtctgtacaggattttatttctccttcacttatgaagcttagtttggctggatatgaaattctaggttgaaaatcctttcttttaagaatgttgaatattggtccccattttcttctggcttgtacagtttctgctgaaaggtctgctgttagtctgatgggcttccctgcataggtgacctggccttctctctggctacccttaatattttcttccttaatttcaaccttggagaatctgataattatgtgtcttggggttgatcttctcaaggggtatcttagtggcattctctgtatttcctgaatctgcatgttggcctgtcttgctaggttgaggaagttctcctgtatagtattctgaagtgtgttttccagcttgtttccatgctcctcatcatcttcaggtactccaatcaatcgtagtttggtcttttttacaaagtcccatatttcttggaggctttgttcattccttttcattctttttctctaatcttatctgcatgccttatgttagcaaggtggtcttcaaactctgaaatcctttcttccacttcacaaagtgtaatgctctgtgtatgcttcatgaagtactattgctatgcttttcagctccatcaggtaatttatgttcctctctaaactggttattctagttagcagctcctcaaaccttttatcaaggtttttagcttgtttgcattgggctaaaacatgctcctttagctcagcgtactttttttttttttttgacggagtcttgctctgttgccgcccaagctggagtgcagtggctcgatctcggctcactgtaagctctgccccccgggttcatgccattctcctgcctcagcctcctgagtagctgggactacaggtgcctgccaccacacccagctaatattttgtatttttagtagtgatggggtttcactgtgttagccaggatggtctcgatctcctaacttcatgatgtgcccgccttggcctccctaagtgctgggattacagcatacttttttattatccatcttctgaagcctacttctgtcaattcttccatctcatcctccgtccagttctgtacccttgctggagagatgttacaatcatttggaggagaagagacactctggccttttgagttttcaacattttttcattgattgtttctcatcttcatgagtttgtctagttttgatctctgaggatgctgacctttggatggattttttttagggacttttgtttttcttgatactgttgttgttgctttctgtttgtttatttttctttcaatggtcaggtacctcttctgtagggctgctacggtttgctcggggttcacttcaggccctattcatctggtttgctcccacacctggagatgtcactcaaggagtctggagaacaacaaagatgggtgtctgctccttcttctgggatctctgacttcaaagggcaccaacctgatgccagtaggattgctcctgtatagggtgtctaacaacccctataggagggtctcacccagttgggtggcatcgggaacaggacctatttaatgaagcactttgtcccttggtggagggggtgtgctttgctagggggaaacccacttgtctgggctgcccagattcctcagaactaccaggaggaatggttaagtctgctggtccacagagactgtggtcactcgccccctgcccaggggctcatgcccagggagatccaggttctgtcccggagcctctggctggagttattggacttcctgcagggaagaactgcccagtgaggaaggatgagtcagagtcaggcctgaagaggctctctggctgcagtctgccacagccagtgtgtcaggctttgggggatacctattgggaccaagccattcagtctcccttgaaaagcacagactgaaaagcccttgaaaagggctttttcagtctcccttgaaaagcccttcccccacccaaggaacttagtgtgttaggcagttgtgagtcccagtgctggctgctaccccttcctcagggagctcaaatggcttagacagtaagccacagctgtggggctggttgcccctcaccctgggagctcagcaggcttaagcagattccagctgagagcctgttgagaatctgcgcagctctggggttgggaccctaagctctggtggtgtgagtttgcgagtgggattttcccatccatgggttgcacagttctgtgggaaaagcatggtttccctggctaggcagcatgctcactcaccacttcccttggctggggggtgagggctcccctggctctcaggtgggctgctgcaccacactgctcttccttcctctctatggatcatgccagtcacctagtcagttctgatgagagaatctggataccttggttgccggtgaaggattcacacgcttattatggttcttttctatgggagcctctgattgccgttgtttctagtcggccatcttggccccatccaaatttttaaatttaaaatatttagatagatgactataattgtatttgtcatgtcatatatttgcgtttgtatagtcatagatatatgactatatttgtatttttcttctaattttttaaaaaatataatgttaaagcaataactattacactacactgttacatttataggatatgaatatattatatatgatatcaatgatacaagaaaatggagaggaaatacatctaaactgaaatttgccatagttttctgaaattaagtcaatgttaactggaatagattatgataaagtaaagatgcatattgtataatcactttaaaaatttcaaaaaaagctaaaaatttatgaaaaactaaaatagcatgctaaaaatatttgttgaacaaaaatgaaggcaggagagaaagaacaggggagcaaaaatgattacacttatagaaataactaaataacaaaatagaaacctttacccaacccaatgttagaaaatatttttctatgttttgttctataatttttatagctttggaatttacatttgtgtccattgttcatttgagttaatttttgtgtagggtgtgatttatgaatcaaagttaattttttgcacatagatatttgccatatcaataattacattaaatgtgaacagaataaatacatcaaaaggtaaagaatgtcagattggattttacaaagcaatatccaactatatactatctacaagagatatggatgagattcaagatacaaacaggttgaaagttaaaggatatatacaaagatgtactatgtaaagagtaaccacaagaaatatggagtgagtataatagtattacacagactctatgacaagtgacattattggagacaggaaagaatattttatataatgataaaagggccaatatagcaggaagatatagcaattattattgtgtatgtacctaacagagcctcaaaatgcatgaagcagagacggacagaaatgaaagacaataggcaattagaaataaatagaaattagaaagaagcaattaacacaattatatttaaagatttcaatactcctctctcaataagaatatagtagacttgaataagcctacagtacactcatctgaactgacattcataaaacactccacccaacaataataaaatacacatttttccaagtgcatataaatcatttaccaagatagactatattctccattactaaatgaatcacaatacattttaaggattcaagttatataaagtatgtttttggtcacaatggaattaaattcgacatcaatattagaaaaaatctctattaaatcttcaaatgtttcaaaatgaaaaaatatgattctcaacaccctgtaggtcaaagaaggaatcaaaaggaaaatttgaaaacattttgagcttaataaaaataaaaacaagtttagttgtatagatttaaatgcttatattagaaaggaataaaaattgaatgttaataatctaagtatccacctccaagaatatggaaaaaagagcatatcaataaccaagtatgtagaaggcaggaacaataaaatcagagtggaaataaaataaaaatgggaaaaaaataactagaagaacaatacagaaaactaataccatcaaaagttggttctttgaaaagatcaacaaaattggtgaacttctagccagactgatcaggaaaaaaaaaggaaagaaaaaattaccagtaactacaatgagggaggggacaccactacagaccctacagaaactgaaaggcttacaagggaatattatcaatgagtttaggctaataaattctataatacagataaaatgtacaaattcttagaaagtcaaaaattaccaaaactgactcaagaacaaatagaagaattgtatagtcctatttcagttgtatacattgtaatagttaaaatcttgctattaaaaaaagcttagattcagatgtctttaattctatcagatgtcttcatctttatttgaaatgagaccaatcctacacataattttttcaaaaatcaaaaaggagggaactcttcctacttcattttatgaggccaatattactctgatactgcaagtcaaagacctcagaaaagtccataggccaatatctctcataaagagagatgcacacacacacacacatatacataaaaaaccacttaacaaatattagcaaactgaatccaataacatatagaaacaattataaaccttgaaagagtggtttaacatttgaaaatttgttgatgtcatgcaccatattaggaaataacaaaaccaatatgattacctcaatgaattcaggacaaaatattttttcaaaattcaatacccattcaacaaattaagaatagaagagcagtttgtcactctgataagagggatttgtgaaaacaaaaattgtgagtattatctttcacttaatggtgaaagactgaactctaagatcaggatcaatacaagaatatccactatcctcatttacattcaatattatcctggaggttctagccagtgtaatactgcaggaaaaagccattaaagacatataaaatggaagagaagaagaaagcccatctttattcttagatggtataatcttatatgtaaaaaattctgaagaatctacaataaaagattacaattcattagcaagtttagcaaggttgcaggaatcaaattgaatatacaaatttttatttgatttccgtatacaagcaacaatcaatcaaaaaaatgaaattttgaaaacaattttatttatggtgatgacctgtacacagatgactaaaaaacattgctaaaagcaattcaagaagacctaaataaatgtagagttgatttgtggtttggaagacccagtattattaaggtgacagttctttagatattgatctatagattcaaggaaatctcaatgaaaatctgaagcatttttgcaaatgcaacaaatttttctagccatcatgtgtaaatgcaaatgacctggtatagccaaaatgatttttaaaaaaataacaaaactgaaggactaatattacctgatttcaacatttatcataatgataatcaaggaagtgtggcatcagcttaaagatagacaaatagacaaatgggaaataatagagtcaaaatgtaaacccacatatatctagacaaatggctttcaacaggggtacaaaaataactcagctgataataaatagcttttttcaacaacccttttatatggttggatttgcatgtttaagaaaaagaaagacaagaacttcaacccatacctcccacattatagaaaacttacttaaaataggtaatagaaataaatgtaaaaaccaaaactgtaaattttttagaagaaaatacagaataaatactttgtgactttaggttaggcataggtttttaactatgacactaaaaagtcaatcaatgaaagaaatagttaaaaatatttcttctttgaaagacactgccaggagaataaaaagacaaagcacaccatgggagaaatattttcaaattacatatatgataaaatgacttttatccagaatatataaatagctctaaacaaacaatccaatttttaaaatgagtatgattgtaatagcactccacacgaaagatatatgaattgcaaataaactcatgaaaagttgttcaacatgattagtcattaggaaaatcaaaacaaaacaaagcaaacgagggaggagccaagatggccgaataggaacagctccggtctacagctcccagcgtgagcgacgcagaagacggtgatttctgcatttccatctgaggtaccgggttcatctcactagggagtgccagagagttggcgcaggccagtgtgtgtgcgcaccgtgcgcgagcggaagcagggcgaggcattgcctcacctgggaagcgcaaggggtcagggagttccctttccgagtcaaagaaaggggtgacggacgcacctggaaaatagggtcactcccacccgaatattgcgcttttcagaccggcttaagaaacggcgcaccacgagactatatcccacacctggctcggagggtcctacacccacggaatctcgctgattgctagcacagcagtctgagatcaaactgcaaggcggcaacgaggctgggggaggggcgcccgccattgcccaggcttgcttaggtaaacaaagcagccaggaagctcaaactgggtggagcccaccacagctcaaggaggcctgcctgcctctgtaggctccacctctgggggcagggcacagacaaacaaaaagacagcagtaacctctgcagacttaagtgtccctgtctgacagctttgaagagagcagtggttctcccagcacgcagctggagatctgagaacgggcagactgcctcctcaagtgggtccctgactcctgacccccgagcagcctaactgggaggcaccccccagcaggggcacactgacacctcacacggcagggtattccaacagacctgcagctgagggtcctgtctgttagaaggaaaactaacaaccagaaaggacatctacaccgaaaacccatctgtacatcaccatcatcaaagaccaaaagtagataaaaccacaaagatggggaaaaaacagaacagaaaaactggaaactctaaaacgcagagcgcctctcctcctccaaaggaacgcagttcctcaccagcaacagaacaaagctggatggagaatgattttgacgagctgagagaagaaggcttcagacgatcaaattactctgagctacgggaggacattcaaaccaaaggcaaagaagttgaaaactttgaaaaaaatttagaagaatgtataactagaataaccaatacagagaagtgcttaaaggagctgatggagctgaaaaccaaggctcgagaactacgtgaagaatgcagaagcctcaggagccgatgcgatcaactggaagaaagggtatcagcaatggaagatgaaatgaatgaaatgaagcgagaagggaagtttagagaaaaaagaataaaaagaaatgagcaaagcctccaagaaatatgggactatgtgaaaagaccaaatctatgtctgattggtgtacctgaaagtgatgtggagaatggaaccaagttggaaaacactctgcaggatattatccaggagaacttccccaatctagcaaggcaggccaacgttcagattcaggaaatacagagaacgccacaaagatactcctcgagaagagcaactccaagacacataattgtcagattcaccaaagttgaaatgaaggaaaaaatgttaagggcagccagagagaaaggtcgggttaccctcaaaggaaagcccatcagactaacagcggatctctcggcagaaaccctacaagccagaagagagtgggggccaatattcaacattcttaaagaaaagaattttcaacccacaatttcatatccagccaaactaagcttcataagtgaaggagaaataaaatactttatagacaagcaaatgttgagagattttgtcaccaccaggcctgccctaaaagagctcctgaaggaagcgctaaacatggaaaggaacaaccggtaccagccgctgcaaaatcatgccaaaatgtaaagaccatcgagactaggaagaaactgcatcaactaatgagcaaaatcaccagctaacatcataatgacaggatcaaattcacacataacaatattaactttaaatataaatggactaaattctgcaattaaaagacacagactggcaagttggataaagagtcaagacccatcagtgtgctgtattcaggaaacccatctcacgtgcagagacacacataggctcaaaataaaaggatggaggaagatctaccaagccaatggaaaacaaaaaaaggcaggggttgcaatcctagtctctgacaaaacagactttaaaccaacaaagatcaaaagagacaaagaaggccattacataatggtaaagggatcaattcaacaagaggagctaactatcctaaatatttatgcacccaatacaggagcacccagattcataaagcaagtcctcagtcacctacaaagagacttagactcccacacattaataatgggagactttaacaccccactgtcaacattagacagatcaacgagacagaaagtcaacaaggatacccaggaattgaactcagctctgcaccaagcagacctaatagacatctacagaactctccaccccaaatcaacagaatatacatttttttcagcaccacaccacacctattccaaaattgaccacatagttggaagtaaagctctcctcagcaaatgtaaaagaacagaaattataacaaactatctctcagaccacagtgcaatcaaactagaactcaggattaagaatctcactcaaagccgctcaactacatggaaactgaacaacctgctcctgaatgactactgggtacataacgaaatgaaggcagaaataaagatgttctttgaaaccaacgagaacaaagacaccacataccagaatctctgggacgcattcaaagcagtgtgtagagggaaatttatagcactaaatgcctacaagagaaagcaggaaagatccaaaattgacaccctaacatcacaattaaaagaactagaaaagcaagagcaaacacattcaaaagctagcagaaggcaagaaataactaaaatcagagcagaactgaaggaaatagagacacaaaaaacccttcaaaaaatcaatgaatccaggagctggttttttgaaaggatcaacaaaattgatagaccgctagcaagactaataaagaaaaaaagagagaagaatcaaatagacaaaataaaaaatgataaaggggatatcaccaccgatcccacagaaatacaaactaccatcagagaatactacaaacacctctacacaaataaactagaaaatctagaagaaatggatacattcctcgacacatacactctcccaagactaaaccaggaagaagttgaatctctgaatcgaccaataacaggctctgaaattgtggcaataatcaatagtttaccaaccaaaaagagtccaggaccagatggattcacagccgaattctaccagaggtacaaggaggaactggtaccattccttctgaaactattccaatcaatagaaaaagagggaatcctccctaactcattttatgaggccagcatcattctgataccaaagccgggcagagacacaaccaaaaaagagaattttagaccaatatccttgatgaacattgatgcaaaaatcctcaataaaatactggcaaaccgaatccagcagcacatcaaaaagcttatccaccatgatcaagtgggcttcatccctgggatgcaaggctggttcaatatacgcaaatcaataaatgtaatccagcatataaacagagccaaagacaaaaaccacatgattatctcaatagatgcagaaaaagcctttgacaaaattcaacaacccttcatgctaaaaactctcaataaattaggtattgatgggatgtatttcaaaataataagagctatctatgacaaacccacagccaatatcatactgaatgggcaaaaactggaagcattccctttgaaaaccggcacaagacagggatgccctctctcaccgctcctattcaacatagtgttggaagttctggccagggcaatcaggcaggagaaggaaataaagggtattcaattaggaaaagaggaagtcaaattgtccctgtttgcagacgacatgattgtttatctagaaaaccccatcgtctcagcccaaaatctccttaagctgataagcaacttcagcaaagtctcaggatacaaaatcaatgtacaaaaatcacaagcattcttatacaccaacaacagacaaacagagagccaaatcatgggtgaactcccattcacaattgcttcaaagagaataaaatacctaggaatccaacttacaagggatgtgaaggacctcttcaaggagaactacaaaccactgctcaaggaaataaaagaggagacaaataaatggaagaacattccatgctcatgggtaggaagaatcaatatcgtgaaaatggccatactgcccaaggtaatttacagattcaatgccatccccatcaagctaccaatgactttcttcacagaattggaaaaaactactttaaagttcatatggaaccaaaaaagagcccgcatcgccaagtcaatcctaagccaaaagaacaaagctggaggcatcacactacctgacttcaaactatactacaaggctacagtaaccaaaacagcatggtactggtacaaaaacagagatatagatcaatggaacagaacagagccctcagaaataatgccgcatatctacaactatctgatctttgacaaacctgagaaaaacaagcaatggggaaaggattccctatttaataaatggtgctgggaaaactggctagccatatgtagaaagctgaaactggatcccttccttacaccttatacaaaaatcaattcaagatggattaaagatttaaacgttaaacctaaaaccataaaaaccctagaagaaaacctaggcattaccattcaggacataggcgtgggcaaggacttcatgtccaaaacaccaaaagcaatggcaacaaaagacaaaattgacaaatgggatctaattaaactaaagagcttctgcacagcaaaagaaactaccatcagagtgaacaggcaacctacaacatgggagaaaatttttgcaacctactcatctgacaaagggctaatatccagaatctacaatgaactcaaacaaatttacaagaaaaaaacaaacaaccccatcaaaaagtgggcgaaggacatgaacagacacttctcaaaagaagacatttatgcagccaaaaaacacatgaagaaatgctcatcatcactggccatcagagaaatgcaaatcaaaaccactatgagatatcatctcacaccagttagaatggcaatcattaaaaagtcaggaaacaacaggtgctggagaggatgtggagaaataggaaacacttttacactgttggtgggactgtaaactagttcaaccattgtggaagtcagtgtggcgattcctcagggatctagaactagaaataccatttgacccagccatcccattactgggtatatacccaaatgagtataaatcatgctgctataaagacacatgcacacgtatgtttattgcggcactattcacaatagcaaagacttggaaccaacccaaatgtccaacaatgatagactggattaagaaaatgtggcacatatacaccatggaatactatgcagccataaaaaatgatgagttcatatcctttgtagggacatggatgaaattggaaaccatcattctcagtaaactatcgcaagaacaaaaaaccaaacaccgcatattctcactcataggtgggaattgaacaatgagatcacatggacacaggaaggggaatatcacactctggggactgtggtggggtcgggggaggggggagggatagcattgggagatatacctaatgctagatgacacattagtgggtgcagcgcacaagcatggcacatgtatacatatgtaactaacctgcacaatgtgcacatgtaccctaaaacttagagtataataaaaaaaaaaaaaaaaaacacatgaaaaaaaaaaaacaaaacaaaacaaagcaaacatggaaatgtttgttattttaattgttatgatggtttcatggctgtttgcatgtgtcaaaactcatcaaatttgtgtacgttaaatatgtgaaacttattgtatgctggttacacctcaataaagctgttaaatttttttaaatttaaaaatattatttcaagaataaaataaccaaaccatattctgggagcaagtatttgcaaattatatatctgataaatgacttgtatcaataatacataaagaacttttacaactcacaaataagaaggcaaactaaaaatggaaaaaagatttaaatagatgattcttcaaagaagatatgtgaatgtctaacaagcagaggaaatgatcattaatcattaagaaaatgcaaattaaagccacaatgaaatactatacatccactaaaatggctataatcaaaaagattgacaaaattggtgagaatatgtggaaatcaggaaccctaatacactgctgatgggaatgtaaaatggcactttggaaactggtttgggaatttcctagaaagttaaacacatacttacctattatgacctagcaattgaactcctgggtatttacctaagaaaagtaaaaatctgtgtccacaaaaagatgtttattttattgttcatggcagcattatttagaatatctaaaaataagaaactggtgaattaataaataaaatatggtgtacccacataaatgatactactcaaaaagaaacaaactacttagccatgcaacatgggtaaactcaaaagcataatgttgaatcaattaagctagacaaaaaaggctacatattgtataattctatttatatgaaatttctagaaaaaagcaaaactatagagacaaaaactatgtcagtagttttctgggactacaagagtgagaagcagttgactacaaatgggcacaaggaaacttttttaggtgatggaagtattttagtcttaggttgtggtgatgggtgcagacctatataaatttactaaaactattgcaccctacatgtacagtgtatcagtattatggcaagtaaatcataccttaataaaactgttagctaaacaataaaaaagatatctatgctggaagtaggaacatgagactcattagcatatagatgatcattgtagctgtaaaagtagagaaaacatctagggaaagtttgttgaaagggaaaacataagaagctgggacagatccctgtggagcagcaacacttagaggatctagcaaaaatgaaaatgagtaaatgcagctacagaggtagaataaaaatgaaggaaatatagtatcacagcaagtaagtatttctaggagggggcttgtcataaagatatcaaatgcttcagataggttaaggaagaaaaagactaaaaggtgtctgatggtggtcacccaagaccttggcatgagcagtttttgaggaccaaataaggtacaagtcaatctggagtgaactgcagagtgagtgggagtaatgaatgcaaacaggagtattgggagcctggctcaagaagtttatctgaaaaaggaaggatttccttccaggtgaagctggaaatgacaggatatagaagtgcaagattttgttttaacagaagattcaacagcatgtttcagtgtggttagaaagaagtgagggagaaaaggctgaagattcagaagagggccataatgagggagcagaaaaagataggattgaaaacacaggttgaaagattaccattaaacagtaaggaataattgttccatgtagaagagtaaagaatggttttaaaataagtgaatttgtagatttcatggcatcaaggaaaggcttgtatgatggcttcttttttcttggtagaaagcaaggtttttgngagtaaaagcagaagtcataataccaaggatttgaggggaatggcactctttaaggacctagaattaggttagtgatcatgaatttataataataccagtctacccaattgtatattttttctctaggaacaagaggtggacagtttgattcactggagttagctccatcagaaagctagtagagcaagggtgtttagagtggtggtaacaaaacacttggaatgacagatcatggatggacaaaagtgaaggcattgggggctgatagacattgtcttcacttgcattcccctgaaacaaggtccgagacaatgactttaggtcaggtagttgatttgagagggagctcaggatacaggagtgacggaatggggaaaataagtcaggaaacaagggaaagataattaaagggtgcatgttttgagctacgtatcattgtgggtaactgcagctgagtcctactggaaancctctgaggaagcctgtagaatgtgcctggaaattatccctctgtagaacagaaagctgacacattaatccactaattcctgtcaccctttgctggagaattatttctagaagcattaactacccccatttttccaggataccttgccagggctgaacaaactctctggcttcagaaaaatcccagaggcagaaaatgaaaagtaatggggaggattgggcttgaggtgaaatattgacagcatccaaaactccacaggaattttctaccaccagcttcagctaaaagctgaagtagtcctaggggcatatggtagaagatgaaattgaaccagtttacaaaagtccctatgcagtcaaagtaattgaggaaataacttaggataatagatggagttctttgattgtatggaagttattgatatcctctgagctattgatttatcatctgtaaatggggatgagattacccactttgtgtggttactgctagaattaaaagtccttattatgtaaggtgcttagcacagggcctggcatgtagtaaggtatagagaacaaaagctactatattattgctattatctattgaaagattagtaatattaataactacctgcattatggataatagactaattcaaattttatgtataatatttttgaatattatattcaagttcactacttaacttgaaccagtaagttcactacttaagaatataatatttcatatgacaagacattgcagttttgtttggaagaacattaaattctggtactttttgaaattagttttatcatagaatggctattgggaaaatcataaatgtaatctaattcccatgcattctttttcctttggttaggatttcgttgaagtttttattagactagaatgatttattttatttgtaaagaaatcaccacagatgtattgttggttttgttttcaaatcttttctgcttttcaacttattcaaacacaagaaacaatctaaatgcattctactctctacaacctctgatgtcaaataagttttctttaattctagcttaaatctttaatgctgcagttttgtttttgcttattttcttctcagtggagaaaaaaggaacagctggttactattgtcaattttctattgtttggaatttattaaatatgcaacacttgtgaatacatagatatcaatacatatttccttccagatatagaactcctattgcttttctttcaagagtgatagaattttatatgggaaagctttagagttcttctagtcccagtatatagtctgattatttaatactagttaaaatattattaattgccatctagaatttcttgtggtaaattgcctgatgtgttctttgctcaactaccaattggactattattatatttcttatgaatatattgcaacgcaacacaaaatatctttgcatattgatgttaactattaaaccactacatgatattttcccccaatttgttatttgtcttttaattcagttgatagtatttttgccttacaggttcataatattttgtcagatatatatatttttctcttatgaatttctttttttggtttcatgcttagagatgccttactcaccatgagcttttatctaagttcacctatattttcttctggtcctttaatatttttatttttaagttggttttctaatccatccagaattaacttaaatgcaggattgcacatttgttcctaataaatttcaagttgtttattacagcatattgctttgatatgttgtaggattttatatcataaatctgttacatatatattcatgctatatatcagtggttctcaatcagaggtgattttgccctctaggaacatttggcaatgtctgcagacattttttattttccaggactaggggagaggctggctactggcttttagtgagcagagagcaaggatgatactaaccatcctacaatgtacaggactgcccccacaacaaagaattgtcaattgtactgagattaagggaccttaagagatgatagatggatggatgcatagttgatagatcaatagataaatgtatagaagatagatattcattgaataccatttttctgccagttacataccaatagtaatattttccagcctatatttttattctttacctatattctattctttaccctgaagggcattttaagagacattgactcctactttatggaaatccagatacattgaattgttggatatccctggtttgagcacataataaatattgaatgagcgttttataaaaatgacaacaataaatcaaataaattttaatgaaccttatttcactacagtaacttatttttatatgttaaaaagtatgctttttaaaatccattgcggagttttgctaggaatcaattttaagcagtatgtttcttctttagtcttctgccacatctgttattctcttgctatgcagcataaatttcatcagaatattaactctgttctctatattatttttatttagttttattaccactgtcaagcttgcagatttccttgtacacacacatctctttaatatgtagagttgcttattcttaccatctatgagaatcattacttttgcataaagactatatccatttttagttacattctgggagttaatattggtatccatggaattatatgtgtcttctgtgtcaaaaatttctattcactctaataacttatcctgaacatattttgtattggtattaacactttattgtttctgatccccttattagaaagatattttcttctgtgtatttgtgagccttttaattcttattttgcttcctgtcatatttgacatcctctacaacagcaatgtccaatggatggaatttatcgtgatgatggaaatgttctgatctgcacagtctaatatagtaggcatggttgagcacttgaaatgtagctagggcaactgaactgaggaactgaattttacatttaatttaatttagttttaattttagtagccacatgtggctagtggctgctgtatcggacagcacaattctatagagtaattccttacccttccatttttagcttaaaatcctcagctttattttaacttaaacctatttttactggttgtgtttgtatgcagttttgtttgttttgtatattgtatgcgtttcttatgtcccagtgattacgttattttttacttcatttcctatgctttccatacagtaataatacatatccttaggcaattgagagtgtgcaaaggtatttctgtaatgtattatctattaatatcaggtgcttgcttttctttacttttttgcaaataaaatgataatgttcattgtaggaaaaatgaaggaagaaaaacagaaaatataaagaagagaataaggcaaagattattactactactaacttcacagacacacacagacatacgcagagggatacacttggttgagtactttctatacatattcttttatttttaaacaccttactgattgtacagctaatacgtatttatcactagaaaaaaaatttaaaaacaggagtaaagtgaaggaaaaaaatcatctgtaatcacaatgcatagattaaccacttttattactttgatttgttttctcacagtgttgtttctaagacctgtgggtagatggtgtgcaggtaggtaggtagacagctggatatgtagaaaggcattttcaaaaattgtattatactatatgcagggtgggacaatagaagtatacacttttcaggtggcaagaaaacaaaattatatgtcactatgagtatgtatcatccacagtggtattagtgaccattctgaacatttgtaactttaatagaaatatatattggttaacatttatccactgggtttgtctatttattaactgtatcttgctttttatatcatgaacatttttctctagtataaaataaaattcacaaatgtgattttaatggctacgtcataatccattcgttgtctctatatcattaactagtttcctattattggacagttaggatgcttctctttttttactactataaatagcattacactctacatttagtgcctaaaatttttcatctctgattttttcatttctgattattttatctctgattatttcattagtatacatttttagaagtgaaatcactggcccaaatgaaatgaatggatatgagatccttggtatatattgtcaatccaaatcaccttccagaaagttctttgttgcttatagaagaaaatattcttgttccatttttatggtttaatcatttttatgcagctattttttttttttttttttgagatggagttttgctctcttacccaggctggagtgcaatggcatgatcttggctcactgcaacctccgcctcccaggttcaagcaattcttctgcctcagcctcctgagtagctgggactacaggcgcgtgccaccatgcctggctaattttttttgtatttttagtagggacaggtttcaccgtgttggtcaggctggtctcgaaatcctgacctcaactgatccaccggcctcggcctcccaaagtgctaggattacaggtgtgaaccactgcacctggctgcagcttttcttcgaacttttaaacttctgtttggttttacgactcaggattgttttttaataaacgtgcctttcaagggtttagcaaagtaatcatattgttataaatacccaaccaacataactttattttttgctagcaaaggttttcagatataagatttttcattgtataaattgtttctttttagggtgaacaaggagaaaaaggagatccagctctggctggccttaatggagaaaatgtaagcctaactcttttttctgatactctgtttacattttaccactaagatatgctatttaatgctattaagatttgcctatttttggcagagccagccagccatgatccaacaaaattaagaatcatggtgttctttcacatggctcagtagaggcccagtgtttttagtttcatttcattggctttatgtattttctacctgtgcttagccttaacaggcctttctccttgacgtttcttgcttgcaaattttctagtcttttttttctgtcttttttcatcttacatatcttctgccatggcttgtgctcttatcagtggttcacttttcatctcagtccaaatctccatctagtctatagatggcgtctgtattggtaggctttcagtgatgggaagaaagggcgaagtgaagggaaactaactccgtattgctcccctccatggcaccagttccacagcctcagggataacattgcctgtgatatcctaggaccccagtcatcttctccccttcccctcaggatggttatcctcccagaattgcactccagattttaggataaaatttgaaggatggcccaaatgtgggtttcactctgaaatgtaattttatttacatttactcaccatttactatagatttgttatctttactggtaggggaagtgtccaaaatgagaattagtttttccctcggcttccttttctcacttacataaatatgttttggaaaggacctgaagggccacatgacttataaaagaataaggaaaaactgtgagactatatctagctccctaatgccctagatgtgttcagaaacccattttgtatgcaggagatcattacagcggaagagaggctgaagaccaatctttccggcctgtggagaaagtcgtgtgtgtgtgtgtgtgtgtgtgtgtgtgtgtgggtgtgtgggtgtgtgtgtgtggagtctcccaaaaaagaaagaccctagtagtaatagtagttaatgtttctatgtatgttaactaaaataatagttgtttcaccatcattcttatttctctccctttgaagtgatttttctacaccagagaataggcactagccccagtggcttgtagctatgggagtctctgcatcttctttaccacctgtaatacatcaggacactgaatgtcacacatgtttaaatagagtaactgactcacctcttactcctgtcattggaggcacgtggtgaagtgggatgagttctggagtagaaagccagggtccagtttgtcttccagttctgtcacagaagagcagatcacttctcagagtctgtaaaagtgatggacttgggatagattcttttttttttttttttgagacggagtcttgctctttcccccaggctggagtgcagtggcagtggcatgatctcggctcactgcaacctccgcctcctgggttcacgccattctcctgcctcagccttccgagtagctgggactacaggtgcccgccactaggcctagctaattttttgtatttttagtagagacggggtttcaccgtgttagccaggatggtctcgatctcctgacctcgtgatccgcccgcgtcggcctcccaaagtgctgggattacaggcgtgagccaccgtgcccggcagacttgggatagattctaaagcccctatcgctattatgtgctatgattttatgcaaagagttattaagattataaacttgaaaagtctgacgaggcctgaagcattcattcaggttcattgagtgcctgctacatgtaaggcacagtgagaaaaacaaaacaggaagagatgaagccagagcataggaagtcctggatgtgaggatgcttgtccttcctcctcaggacaaaggggagatgtggcccacactttgtttaaatgaaaattccttttacagtggattctgaaatggatagaatttgggcctttgcctgtgttttctgttctttctattacactctccgtgaaagcaaagaccatgtgttggaatcctagtacttagcacatgtttggggtaagttccaaataactatttgctgaatgttagtttgaaaaactgagcggttattaatattatgacagagtaaaatataagtaattagagtctaagctagaataacagatgtggaagggaagatacagagaatgatgctaaagaggtaaaatacatatgatttggcacttgattggagttgaaaactcaaaaatagcccaacatgttgaccgttctgtgtgagaaggatactaacttgtgagaaatgtaggagtgttcaaacagattaattacagtgttccaaaaaataaccaaactacaagtatgtgggctctctgagatagaggagcaaaacagagtgtattacaagtgcataaaagtaatattggaattgaaatagaaagaggagtttttgaaatatttgaataaaactagaaagatatttgagaggttggaacctgaaatatattcacattaatttcaagatttgaaaatttttcttacattgtctgaaagtaaggtttttgggctttttaattaatcaactgatacatgcatatatttgagggcctactatattcccaaactctctgtcagccactgtgtgagttccaaatctgagtaacactaacttactgagagatcccaaaggcctagtgagcagtgtgaatgtctatccctttgaggaatcttgaaagagtccttcacatgccccaataacaggaggtcattcctttagcaccgttattgtctgatgtagctcattaagtacaaccataaagcatgacaaagcacattaacttttctcacttggttacttagttaataagtagatgatgttattttttccccttaattttgccaaagatattcaggagttatgactaaggagaaataacaaaaagtagtaagagttctcctctttcccctctatcactagtagtaaagaatcagctgcttggttattacactgttggagatggggggagtgttaatattgtgttatagttcataaactattttcacaaggaatttgaaatttgaccctcacccagcttaattggctagtagagtggggaatgatagtattcgtattttcagaagcaagaaattaaaggcttcagaaattaagcaactttcttttttaaaatactaaaattggcctttaactctaaatatttggctgaaaagtctgatcttcccagtaaatcctgccacacatcattgcttatttttcagtgctaaaaaaactgagtctgcaaactaaagtaattcagcgtttatgacagttcactctgactttcaataagcccaggtatacattcttaggaattgaaaggtattataatggctattttgatttgaattaaagtcaagccaatgatggaaatcataacttcagaaatattgtcttagaatgtatggtaaataaactcagtgagccaggtgactccagctactttctaagtcagagtatattggaatgctttaatatttctactaaatgaattccacagcctttttaatagtctttattgctgtgtattatatatgtatcttagtgtcaatgtatcttataataacttattttgtgccagctttctcacaaaatgggccagctcactttggaaagtgtaaactttaatttaaagggtagtatgtagcaattcagtctttctcaatgtggcactcttggcattttggcaagacagttctttttcaagtcagactgtcttgcaagagcagaatgtttagcatccttgaagctcaccaacctaatctaaatgccagtagcagcccctagtcattgggacaagaaaaaatgtgctgatatttttctaagtgtatcttaactgtgtgtgtgtgtgtgtgtgtgtttgtatgtgtgtgcatgcctaaacttttgtttgatgtctgtggtattactaaacaaatgcatgctcatatgtccattctagtttaaataatgcatacaaaacatatattaaaattttcaaaaatttgaattgctagaaaatttaaccttgaaaatatatgaccttgtctttacacacaatctagtgtataattaaataattttgattgtggcctaatacaagatatatttaacaaaggtatcttagaatagacttgagagagaataatataaagttgtaattgtgatctttaaagccagactatctgggttcacatcccagctctgccactaactagctgatgtactacttggtaaattacttagcctctctgtgcctcagtttctttatttgcaccatggaatgataatttcaatatcctctctgtgcctcagtttccttatttgcaccacggaatgataatttcaatagtacttactgtaggggaaaagataattttcccttcccctctgaggggttcagtcagctgaaatgaactgacaatggacagattaacaggagaaaaggcatacaaatatattaacgtgcatacagtgggagccataaaaaatacgagactcaaagaaaggccagatggttgaagcttaaatagaaccctctttataggaaagaaggagatggggaaatgtaggcaattttgagaggtagtaaactcttttttgaattgaatgggaccaagagctaacaatagcttgtggacaagttacagaaaggtgaaggctggacctccactgtgaacaaaagttgtcttgttttgcagataaagactcccagataatctctcagagctgccctcagaagaatagaccaagagtctgtctgggcatcgtgacaacttttagtttattctcttctccagagattaattttcctggttattctgttagattcctaggaagggggttttaagacaattgctttttttggaagaagatttctcagtctgataaagaaacttccagagagagctcctccctgtacttgaggaggggttggaggaaaaacaagagaaggttagaaagttcttggatctgaggcagcttctaaggcttttcaattccttttaattcaaaagtactcagcatgccaaagcaccacactttggggttatcactctctgtaccccaaaattacctcatggatttttttgtgaagattaaagggactatcatacagaaagcctttagaacagtgtccaacatagggcaagaactatataaacattcactattattagaaaccaagttaaataaaacacatttagctctaataggtacatgtttttatttatttgtttctgtggggttatacaatcttagaaaagtagacttaattgttgagttgtctctttttctgaatctatattatggtcttttaagtatcccttattagaattacagcatctgatgtttctaaaataatcatgttaatctccttataccaatgcaatctgtactagagnatacaaaaatattgaaatcacaaaaccagagataacagctggcaacagctgttgacattgctagggaataacattaagtcattgaaagcttgtgaaaagaattaattgatgggttaaaaatttttaacaaataatatttttatattatcttctgaattttaaagatatgatatcccatgagtagtactaggtactccaacaaaaattgattttatagtctacccgcttttataattctagttataatactgctcttcagcttttgtcttgcctttagataacngtttctgcctccacattacatgtagaatcaactactgtgcttttgggaatctttatgtacatgaatttgattgaaaaccttcataacagataccgatcttactcaatatttaattcagagtctattccatttggctctttatgcctatggtgagtgctgtgtcctttctccctagcactcaataaccattgataggagcaccagtgtgacacaaggagaaaaaccgcatttgagaaaagcattactgatgtgtttctcagaggctattacaatgccatggccttaacaacattgtactttgtcacaggaagacgtgagttacatgggcctactttaatggtcataaaagtagaagcttgacaaatgcagtacttctcaattgcattttatcctatgtgagttaaagcacagttgttacatatccatcaaactggtataaagctgaacaagaaagaactatcagttatcccttaaacttgaacttgaaaagtaaaaacaacatttattaagngcctaccgtatgctaaatgtctctacaacatatgattctcagaacaacccttcaagaaaactattacttattatacctattttataggaaagcttacccaacttacccatgattatacataaaaggccattcgtcttctgactctgctgaaatccacatctgtgaagtcttggacaccccagtagaattaggcatctgtgggaaatgcttttgtcatacctgctatatacttcaatgataatactcaatattcacatcagcttgtaattggctacatcatcccttcccctcctccctgcccatagttgactgaaccagggagagttacctgattcaactgccaatacattgcttccctagaaattacaactgggattaatttgttggaattaatctttaaaacttttaatgtattattttatacctacaaaataatatatataacatatatgatggttataaatcatagttataatgaggaccccagtgtacccagaactcaatgtgagaactaagacgtcatcctccacttggaatctccctgtgtggttcactatatactgtcctccactccagagttaaccatttttctaaatgctgtacctaatgtttccttccatgcttaaaaattatgtttcacacttacacatttataaggagtatataatttagtcttacatgtttgcagacgttcaataatatttgttgagtaaatggatactcaaggtttttatcagtcatttctttttttgtgtttgtcttttctctgcatagttttacacaagcaaaaagagaaaacctttttttaataaatttctctgctcagtgaatgggataacttcctagccagttacttaagtcaaatgcaactcagcctggagactttccttcttcttctccacttctggcatatctgccagtcttgcttccagcatgtgccaactctgaccacttctcatcatctccactggcacaagcctgtcccagccatcctgctctctttcctggaaaagctgtcatagccccttttatgctcccactcttgctgcccataatttgtgttccacgttgctgccaaagtggtttgtggggatttttgtaaacatattcacatcatgtcattttcctgcttaaaacacttaagtggcttcccattgcatgtagaacaaaacccatcttcctcatcatggcctgcaattacttatgtaccatgacccctggcaaaccttgacttaaccccctactccttacctgtgtgctcatgacactccttttatcttagtgacctctgtgcttctttttccctctgcccccacacagatcattgcgtggctggatccttttttttttaatttgagcaaattcatgaggtacatgagaatttttttacacatgtataatacatagtgatcaaatcaggatgtttaggttgtccattttccaagtgcaatacattttttaaaagtatgcttatcctactctgctatcaaacattgaatttattccttctaccttactgtatgcttgtatctttttatccacttcttttcatcctcccttgccccctcactcaccctttccagtctttgttatctatttttacactttctacctccatgtgttcaaattttttttgctcccacatgtaagaaagaacatggaatatttgtctttttgtgcctggcttacttcacttaatataatgactttcagttccatccatgttgctgcaaatgacaggattttgttttcttatggcttaatagtactccgttgtgtatatataacaccttttctttatccattcatctgttgatggacacagaatgattccatatctttgctaggatccttctgaaacaacaaatgtcaccaccacacaaggaccatttctgacaccccccttgaagtagcaactctctcctctttcacttttatcacattcagcctgttgacctgtttattgtcagccactcacctcttattacatgagttccttgaggacgggaaccttcacctagttaaagaaaaaaatcgttgacacttgtttttaaaaagcgataaggaagacattttattccagactattgcaataggggaattgcaataagggagacagatcaggttcaactctaactacaacaaggacaggtggggatttatagccaatgagtagagggagggatgtcactggatagaaaattactaagaggagacatcaagggtagggtgattcttaccaaactgatctaagaagattcttgctgaagacaggccaaagacttagacatcaagttagaggatgaagaacttgatcttctcaaaagtaaggaatggagaagagattttaagggtgagagattctctctaaacatacttagcaagattcttgctataactgagctgggaagaccaaagacaggatgggggccatggtccaggtctagctgagaagagggctcagagaaccatgactaaaagtttggtgatggagagaatcttcattaatttcttgttcttttctgtatctctaaagtcgtactaatcaatagaaatataataagagctacaaattcaagatgaaggcaaatatattatttttttctagtaaccaaattaagcaaaataaaagggaacaggagaaaatacttttaataatatgttttatttaatgcaatatatccaactgttatcatttaagcatataataatttaaaaattattagtgagatattttacatttttttcttatactaaatattgtaaatctaacagtgttttatattcataatacacctcaattcagagtagtcacatttcaagagttcgaaagctacatgtggctgtggctaccagtacaggtctaaaggccagaagcaacttcacacaaggtatataataaatgtttattgaataaataagtgaaagaacaaatgaattaataataaatctattcacagaaatggcaaatttcttccttcaagtgtttacaatattctgtttccaagttctactctggaaacatgtataaatagagtatgcgttccttgatttgggaagaaatggatattgtaaataataagacaatactgtatcacatctcaaatatcatttaatttttcactcatcctttttctataaatattccaaggtaatgatggaaaaaataataactatgagttttatacgtgaaggcatttatgcaactagaagttttttttgccaattaggtattgttttcatccattaaaaatgtttttcttaaagtataatactacaattttcacacactgtctgcaacaggattattttaagtatctaattttcttttgtttctttcacttcatcactggtgtctatgttgagtacaggtgatggcatttggcattatttattcactacaaaatgtcagggcagtaatagccgggtctttcagctaggaacagtaagacacttagacttgctgtgcattgtgtggcttcagaatacttctttcttctattattgttcttccttcatccagtgtgttaaactaaggaaaaaagaagttttttttttctatttaccacgtagtcaggatgtgtctatctaactttctacgtacactgtgaattcatgcagctgtagagctgatctcctctggtacaatctattgtggaagtctcaaaagctgtcattgcttagtcagatcaactaaatacccattaaaacatccaacagtccagaggacttatgaaaatatttatctgttattctgtatatgtcatatatagtttcatttgacatctttataaatccaagtaaaaaggaattagagaactaaaatatactttaaaacaggcaagagattacattttagctccagttgtatgatagcaaaagaatacatctttcattccttttcccctcacaattagatttcttgatagagacataaaaatgtttttgattttactcttgaatttttttggcaagcttaacaaaggccaaatcaatgctaaatcagaggtatttacaacatccacaaatttaatccaaagtggatacttaaaagctcatatagatctaaatgatattctcccagatggtgaattaatgtaattttagcaggaagcaaagttgcacaaatatgcagtattgaggactcgcgctgatttaatgtatctgtgcccaccacggcacagatgttgcttatcattttagtgccagttgtctctatttctctctatactacaaaaggaagaatgagatttggaggttcagtaaattatgatttattttgttactaatgacttgttagaaattaaagctttctgtgaactgtgtattggttatattctttctacagggtttgaaaggtgacttgggtcctcatggtccacctggcccaaaaggagaaaaggtattgtgtttacccagccaagcccaacctttctttaagaaaactctgacaacctatgcagtgacttctcattgatactgtttatctcctaaaagcattctaaaattaaccaaaagctgttaccttaatagcatctgaataagaacagcctttttgttcatttaattagtttgaaaagactaaatgcacaattgctagttgacattagctggtatttataagatttcccttttctcacccttgcttaacagcatgaggtattcaatcatcaaattagcaagtgtgacctgtattggaaaactttgccaataacactgagctgctgccataatggtgaggcaagtggcttttggaaagaagctagttttgtatctcagtcttaatttaactattccattttctgccactttttctcataaaataagttatttcataatgacatgttggcaatgatcttgaaaaggaaattaagaaataggaaaaagcaagggttgttttgaataaagtagttgggtgatcccagtttgatgaaaattgtatgtatatgtgttttgcaatgcattttgttctccatttttagcacatttagaaatccttgtctatcttcaatatttatctctgtgttaaaggtgatcctgcaaatgagttcccagtgactgatttaagccacttcagtgttcccttagcaactgttggctattttaattcaattgttccaaaaaacaatgaatacacaatgctaagttttaacttctgaggtggctatattggttgagaaaagagaaagtcctaaagatactcattgtgagactacagcatcctggtaccccacgctatacagtacagggcttccataatgtgcagctaaataagaaccgtggaaaggatgcgtggtctttaatgtttgagagttcttaagaaataaataaagttcctgggaaagtaaacatgaaggtgacatagaaattggaaaatagtgaacttttagatgaaccattttttaaagatgttgaatagtttgttgatatatccacctggaaatttgtattcacatagatcagcaaagcaattttagcgttcagaaatacataaatataggcaaagcctcttacagttgatggcaaatgcaatgccaattcagcagagctttagaagaggccatgggactgcttcttgcagctgggaagcatgaaatggggagatccacttattatttctgctgatcttcatactaactttgtcagacaaattatctatcgccgtgacacttcccagctgcttcattggcaagtaaacatacttgaaaatatattatttctaattttggattagtagacaaaagaatagaaaattagattattttcgctttcaaaacaagtcctgctgttgcaaaaagcatagagtatacaaggtgatttttatatcatgaaagctaaaagggacatgatatattttctttatgcagagacttttatcaggatgaagttctatttttctattcttcaagatttatctctatatattgcttctatccacctagaaatttataaataatgtgcaaaaagggactagtggtaattgtagcttttctttaatctattttagggagatacaggacccccaggaccaccagccttacctgtaagtattcttgaaatcaaaattcaaaattgaaatccattattctgtttattatccatattacatcatgactaaaccagaatttaagtcacagagttaagaattgaaggtgacttcgagtacatgtagtcaaacctccacattttaaagatggggcatctgcccacaacagtgaaatatctgacccaaggtcatacaggtagttacaattaaagtctggaatcagtacctaccctgagcaatttcctctatcctccatatggctcataattttgtctcctaaatgtttgattatgcactcttaacatcaggtttaatgtaaatggaatcagatacagtcctacttgctttaaaaactgtaaaaggacaaaacaaactctaatcacccagtgaataaaaacagctacctatttaaactggtaattacattctcccaacactttccaaaatcattgttattttcctctatgatttgattctaaaatttgcagatgataaaattgcaatattttagtgacagatttatgagaaaagtttatagtgtgcacataatgagattgttctcaatcaaatggtacatcatgtattaagcactttataataaatatatgattctcttatattcagatacaatttactattacagacttttttcataggtgattaaagattcttatttaacttaaataagactctaagcctaatggaaaagaggacagttttgttttgttttttttaaaaaagatcttctatagcctgaagtcttttgaattttatgttgatgttacctagtgagataaattaagcatttaaatcagtagtattcgaagacctattctgattatagaaggtcagatttttaaaagtattctagtaatctgaatggagcccttcccataggtagaacataggaatctcaaaaactgtgtgattttgataatatttatatttatctttgtacttaaaaatcccattatgaaaaatacattaataatgtcttacacaaataattgttacaactcccacataaacaaatgttttttgatatgtggaaaacctaaggaactaaatagataacttacttggggataactcattcaatttgcagtggaagtttatgctttaagcttttattttaagcatgaaaagaaagactatttttttgagaggaggttttaagtgcatattattcagttttttatactttgtagaattttattttattttattttttgagacagagtcttgctctgtcacccaggctggagtacagtggcacgatctcggctcactgcaacctccgcctcccgggttcaagcgattctcctgcctcagcctcctgagtagctgggactacaggcacctgccaccatgcccggctaatttttgtatgtttagtagagacaggttttcaccatattgatcaggctggtctggaactcctgacctcaggtgatccgcccacttcggcctcccaaagtgctgggattacaggcttgagccactgtgcccagccttacactttgtagaattaaaaaaaaaaaattatttagcagtgatttagttaaacctgctctttttacttaggacagatgcctgtttctctttaactaagttacatgcagtcatttagttaaacctgctcattttatgtaagacacatgcctgtttttcttcaactaagttatatattcaactactcagttatctgatttcattgtcattttcaactcatgttggaagactgatatgcaatctacatatattatttcgcctgaaatacaattttggcttctcaatcagaaaattgtattggattacatatattttgtggatgtttaatagcagctagcttctttctgccaaggaacaccttgaagatacctctctgcaccaattcatctgtcaagcacttagagattacaagctaatttcatacttgtctaaaaatacgacaaggaaaaaacactatgaaatgaaatgttttatttcataaagtaaaatattcatattattggggtattactattttgtatgcttgacattactttctttattaatataaattatcaactcttccctacaaaatagggataaactaaaatgaataccaacttacaatacactaaatatttaattgatcttataatacaggttggtacattattagttgaaataatttataatagtctttgaggaagcccaaatgactaactgcgttatatttggattaaatgaggcagtgatatattggagtcaataaacagagttcatccataattgttctcaaaactagctccacgctaaaatctactgaagagttaaaaaacttaaccaatattggggctccacccccagaaattccaattcaatcaacctgatgtgggaccagtatattttaaaagctccccgagtggatctaaatatgcagcaagagttgagaaccattatttatgggaactagaatggaaaaagctttcttcctactcaaaaaaattatatcagattgttgaagaagtccaacttccatttgaaatccaacttaatacatagcgataaagaactatctctttccgttagggaggcatactagtaaaatgaagttaagattgaaccctgcttcattaaatggagagaattagggctaggaagatacctttaattacaaccttcatctaaatgtccatgtactcctgtggcttgggtgcctttcatgcttcttaaaatttaatgtatgtaggaacactcagggtcttgttcaaatgcatatttttattcctaagtctgaggtgagatctgagcttctacatttctagcaagccccaagggagtcagatactactggttgttgcactacactggtcacaaaggcttagcaccctcttcccagttagctgccttttcccatagatcaatggttctctgtcgcatcctggccaacatggtgaaaccctgtctctactaaaaattagctgggcatggtggtgtgtgcctgtagtctcagctacttgggaggctgagtcaggggaattgctcgaacccgggaggcggttgcagtgagccgagatcgcgccactgcactccagcccagctggagacagagcaagactccgtctgaaaaaaaaaaaaagattaatggttctctatcttgactgcacattggaattacccaaggtgctttaaaaattctaattcccagactgtaccacataccaataaagccagaatctccagggagggactcaggcaacagttgtttgagatttttcccaagcagttctaatgtgcaggcacgctcgagaactaaggctctgaaagcatgtctaatacttttctttacagctttctcttacagatcttgagcaaacattttggaattactcattacactagtatttatatcaaaaacacccaacctgattactttcaggagcttccaggagaggccagccttcctagtcatacctacaatttgcttcctgattacttcattatagaggatagatgaacgtccatctccacatttacaagctactagcaagtccaacagtaatccttcttgagaaggacaacaagcattgacaacttcaggacacagaattccagaaattctcaaagcacacacagctgaactgcccagaataactaagggcgaagagctgaacactttttccccctctaagccatacattctatatttgctttacttttattcatattttgtttaataagaaattaagagaaatagtaattgagcacactgtaatactgagtttactgatgcaggggcaatcctttatgatgtttttggggaagtattgtttttttttttttttcttttgagacagggtctcactctgttgcccaggctgaagtgcagtagccccatcacagctcactgcagccttgacctcatgggcttacgtgatccacccacttcagcctcccaagtagcagggactacagacggttggcactatgcccagctaattttttttttttttttaacaaagacaaagtcttgctatgttgcctaggctggtcttaaactcctgagctcaagtgatcctcctcccttggcctcccaaagtgttggaattataggcaggaaccactgagtccagctgggattatgtttattgctgttatttttgtgtccctgtggattcttgtgcttttggtacttaaattttttttaatcacatagaaccagttcatcaaaaaaaatctgatatgtaaaaccatctatttcattaaatgttacttttgttgcttatttatactttcttttataactcgttgagtctgtatataattgggtctcagtggaagagagagaataaagaagtgagggtgaccaagtttaaaaaggagtaggaaaggtaaaattgaggaaatggcgtgaaacacagactggagtcctagaaacagtttgatttgctaggttcagctacaatagcttttaccctttatttcacctctcccttcctatcacctgaaagtattcttactgccagtgaccagtgcttcctcactctctaatatataagaaacctattaataagaaagccaaccaaaatggtgctgcagtttcaaatgcagtttgcaatatacccctttattatttcaggaaatgggaccccattcaaaattccacagttgaatccctttgataacgtttgaatccttctatagattcatgttcacgggtcatatggaaaatactccaatgtgactgccttggagaaaagaaaaggaaaaaaaataataagagaaatctgaggcctgtaaaaatgtcatggagattaaagtgatatttatggcattaattgtcacttacatcctttaacctttaaatattctgtcaatctacttgacttgataaaaatagaattatactttttgatatgacgttaataaacttgcaaatcttattttgtagactttccagattattctaacaataaaagatattgaaattcaagaacaaatttgtgaatctgtaagtggaacatctggaaactattttgtaaaacagtgtccaagaggcttcccttaatactttttttaaacaaaatttcatatagagatacggaaaaaaagaaatgaaacactttcagcccagaaggtgggaatgtggttgaattacacacacaaaaaagaaagactaaaaatccatggttgccaccataaacccaccttcatgtatctcttgctaggaatattttcagcaaatacagctagttgaaaataaaaaatttaatgaaatatctgatttcttttcagccactttttggaagataccaaattcactaattagtttggtactaacaactattttgttaacacaataagccattatagaaacttataataattttaaagttctaaagaaataaatatgagattcttcaacttgatttaaattaattaactgattattccacccttatcctttttatatttcaaactgataaccattttaaaaatagcacatcttgttagattttaagtaataataatataaataataaatggtagacatttattcagtgctatgtattgtttaaaccaaaccttaaacaaccctgtgaggtataaaatgattattactacatcgtacataagggaactgaggatgggaatatctaagtaaattgtccaaggttcacagatgttacataacagagctaatattcaactgcccatttggctgactcttaaaacctaagctattaaattctgcaagcattatttaaatctagtttaaaaaattataaaaaaaacagaaatgttctaaactattgcaaaaattaaaatttttaaatcaggtcaggcatggtggctcatacctctaatcccagcactttgggaggccaaggcaggcagatcacttgaggtgaggagtttgagaccagcctggtcaacatggcaaaacctcatctctactacaaataaaaaaataaaagtaaaaaaaaaatagccggatttggtgatggatgcctgtaatcccagctactcagggaggctaagtgggagaattgcctaaacccaggaggaggttgcagtgagctgagattgcaccgctgcactccagcctaggtgacatagcaagactctgtctcaaataaaataaaataaaataaaattttatcttgaagccaaaattcagaaaaattcaagtgcctagcagagatggggtggaaatgtaaatgtgcgatgcagcccagtgtaagataatagagtgtgcttggggttagggaccaggatagctatgtttatctcaaagtatcaaattcgaattaaaaactacttagagattgcctaatgcagaatataggcatactttggagatattacaggttcggttccgtaccactgcaataaagcaagtcaccaattttttttgcttttccaatgtatataaaagttatgtttatattataccatgtcctataaaatgtgcaatttatattatgcaaaaacaattttacacattttaattaaaaaatactttattgctaaaaaatgctaatgatcatctgagccttcagtgagttgtaatctttttgctgtggagggtcttgcctccatattgatggctgctatctgatcagggtggtggttattgaaggttggggtggctgtggtaatttcctaaaataagacaaaaatgaagtttgccaccttaattgacttttcctttcatgaaagatttctctgtagcatgtgatgctgtttagtagcattttacccacagaacttcttttgaaattggagtcaatcctctcaaatgctgctgttactttatcaactaaatatatataatatttcaaatcttccttgtcatttcaacaatgtttgcagcattttcaccaggagtagatttcatctcagaaaaacattttctttgttcacccataagaagcaactcctcacttattcaagcttaccatgagagtgcagcaattcagccacatcttcaggcttcacttctaattctagttctcttgctatttctaccacatctgcagttacttcctccaattacatcttaaacccctcagagtcatccgtggggtttggaatcaacctcttccaaattcctgttaatgttgagattttgacctcctctgtgaatcacaaatgcctttaatggcatgtagaatgttgtttttcaatttattttgcccaggttcatcagaggaagcactatctatgcagctatagccttacaaaatgtatttcttcttcttttttttttttttttgagaaggagtctcgctctgtcgcccagactggagtgaagtggcgcgatctcggctcactgcaagctccgcctctcgggttcacgccattctcctgcctcagcctctggagtagctgggactacaggcgcccaccactatgcctggctaatttttttgtacttttagtagagacagggtttcaccatgttagccaggatggtctcgatctcctgacctcgtgatctgcccgtctcggcctcccaaagtgctgggattacaggcgtgagccaccgcgcccggccacaaaatgtatttcttaaataataagtcttgaaagtcaaaattactccttcacccatgggctgaagaatggatattgtgttagcaggcatgaaaacgacattcgtctccttgtacatcaccatcagagcccttgggttaccagatgcgttgtcaatgagcaggaatattttgaaagaaatatttttttctaagcagtggtatcaacagtgggcttcttcagtaaaccatgctataagcagatgtgctgtcatccaggctttgtcattccgcttatagagcacaggcagggtaaatgtagcataactcttaagggccctaggattttcagaatgaggattggctttaccttaaagtcacaaactgtattatcccctaactagagagttagtctttcctgtgaagctttgaagtcaggcattgacttttcctctccagctatgaaagtcttagatggcatcttaactgctttgttgacattgaaaactcgttgcgtggtgtggttaccttcattgaagatcttggataacttgctgcagcttctagatcagcacttaatgcttcactttgtacttttatattctggagacggcttctttccttaaacatcatgaaccaacttctgctagcttcaaacttttcttctgcagcttcctcacctctctcagccttcacagaattaagaggcaagggcttgctctggattaggctttgatttaagggaatgttgtggtttaagggaatttgtggctatttgggtcttttatccagatctttaagtctttcttcatatcagcaatatggctgttttgctttcttatcatttgtgtattcactatagtagcacatttaatttccttcaagaagtttttctttgcattcacaagttggttgtttgtctggagggacctggcttttgcattcacaactcggctgtttggctggagggacctagcttttggtgtatctcagctttcagtacactttcctcactaagtttaatcatttttagcttttaattgaaaatgagagatgcgcaactcttcctttcattcgaacacttgaggccattgtatggttattaattgacctaatttcaatattgttgttccttaggaaatagggttgcccaagtagagggagagagacagagaaatggctagtcagtggagcagtcagaacatacattctctctctcttccctttctgaaatgccagtggcagatatgttagatttttgataatgtccctcttgtccataaaactctgttcatttttttcccatctaattccatcttcttgggaatggatcatttccaataagcccttatcaatcttactcttgctttgttaatttccattctgctgttaagactatcatgtgaattttttagtatagatactatatttttaagctagtgaagtttattttatattaaatagtgtctatttctctgctgttatttcctatcttttcattcattatgagcatgttttccttcctgtccttgggaatacttttaatagctactttaaaatctttccaggcacggtggctcacacctgtaatcccagcactttaggaggccgaggtgggcggatcacctgaggttgggagtttgagaccagcctgaccaaaatggagaaatgccatctcaactaaaaatagaaaaattagccaggcatggtggtgcatgcctgtaaccctagctacttgggaggctgaggcaggagaatcacttgaaactgggaggtggaggttgtggtgagccaaaacataccatggcactccagcctgggcaacaagagcgagactctgtctcaaaaaaaaaaaaaaaaaaaaaaactttctccgatcattctgtcatctgagtaatatcaagtagttctttgttgattgtcttttctccttagaatgggttatgttttggtgcttacttgtatggcaagtaattttttattgtattttggatactatgaatggtaagttacaggaactctgaattccattttttctgaagagctttaatatatttttaaggcaggcagttaaattggcttgactcgcatagcaaactctgtttctcctacagctggcaacagctgaaatccgttttgttcttttaagctaagctgagctacttgcagtttgcactgtgtatgtttggttaggagtcagccagagatttggggagagcttatacgcagaattttggacttccttacttatttcaggatttgacaaaccaaccccactttactttacaggaattgcatttgccctaaactctgtcctcagatttttcaatccagcaagtctgtaggctttctatttagctaacccatgacccagacttgagcctgtcctcagactaaacatcttaaaaacagaaaactgactccatgctgtttaatttttccaaatgttgactcccctccagtatctgcctgcttttgatgagtttccagtgtcttcaggtagttgttctacatgttgttcagtatttatagttgctatctgtgagcatgttgatttaatataactactgggccatcctggaagcccatttttgtaatacaatgctgagtaacttataatttacttagatatcttgctcctgtaaacataagtgagttagccttcacatttctttacttattctattgaccttgccttcaaaaaatatctagaatctgaccaattctcacacctctgctattactacttggtcctagttaccattataaatctcttgattttttcagtagccaattaatggtctccctccttctccccttgctcttcttgcgtgatttacacaagaagccagaatgttccttgtcactcttcttttcggaatctccagtgtttccccaggtaattaaataaaacccaaattccatacaatggcctacaaagtcttacaggattcaactctcattgcatttctgacttcatctcattttcttctctttctttctgattttactccacaacaaagtaatttttccagaaaattatccaatattcaatttttttttaatgcagagtgctggccaattagaataaatggattgttctgattcagtgcactggtgctgtttgtattttcaggcttacagtgaagaatgaatgactattaagttttaattcctgtgatttgtctaatgattatgatacaaagtttaaattaaaatgtctttaatctatagttgtagattttaccatgtcttgccttattcattttttcatttctcagcaacttgttaaactcatagatggtaaaatttagcattctaatcataaaaatgtgaaataacttgctataaatttgagacttatggtttcaacagcacaaatgaagccaaatacagtcaaataatgcagtgattcagctgaaattctctaagcaactgggttattaacaacaaagaaaaattcccttataaatatgtttttcatatatatgtaccaactttttgaaattccacgttttaaaaatatcaccaaatcacattttttcaaaaggtatttgggttctaccacatctggaatggccatattgctaatatcattgtcacgtattgagttgcagtaatgatggattagaaaaggcacttttgaataacctgttaaagaataaaaattccttttctaaattatttaaaataaatatgttaacaaaactatattcagaatcagcattttttaagatactgtattctgattgtgagaaaactaaatacttaatgtcaagatgacacttaaccagtgagttactgataaacttaaattatctcttctgttgatatttgtaatttacaaggcagatatacgtgagctaaaaccaatgctgaataagaaaaatgtgtttatcataataagtatacacatttatttgatcaaatataatgtatccaaggtcataatgaaaatctgataaattattctgaaatatgaagatgttgacataaaaatcctctattaaaggtaaatatttcatggtttaatcatgttatttgaaaaattgcattttatattagcttttcctctcgtgttgaaatattagttgtaaatcattacattcaaatattcaagtacgataagcacaaattctttggttatatgtcatctgttgttaaaaccttaattttatataaatgtagtgtgtctttatatgtaacttcacaaattgtgtatgttctataaccttcctattacatactattgccagattctcctcaattaaataatataatcctgtttttacagtaaagttttactgaaatacattactaaggcttcagaagcaagacagggactatgagtgaaatgagacagttggctaacatctctatctccttttctcttccagtctttgcatgtcatgtcagaggagagacaggtgaaggaaggtagaacagtgctatttcatgtaatatatccactaattttagttcctaggaaaatggctgtgttgctctggccatgtctctttgggaagttattaaatactcatccagatggcaccaaatgtttatgcagaagccaaaggttaagtctgtcaacagcagaagtgccttagacatgcttactaaatgatacttaaataccagttccttggagcccacataaatccagcttcagtgagaaattacgcacagagagggtgcatagcttttactctaagaaaactaccttaaataccataagcaacggagagaaaatctcagctggtcatttataaatcaaatgacattcaattagcagatgcccctaatgcacaagagatcatatagtgttcacataagggaatttttgaaataattatttttctaagttggtatgtacaagaaacaaaaataactgctcagtaagtgatatggtccctttcctcccttcctcttttacccactcatttagttgaatgcttactgtgtgccagatactgtgttaagccctgcagacacagtaacaaacaacaatcattgtcgttgccttcagaaaacctacgtggtttaagaaaaagcaaccaattggttaaagttgatcatttttaaaatgatcgtttgtgaattgtgtataaaaagtttacaagtatttgtacaactgtagttgttcatattatacacagacatctagttatttcagagaaaattattttttaccagaattcttatgttgtaatttaaagttatttacttttggtttgttaaaatcagttaattggaattaatataattctaatcctttttagagaccaatcgttttttagttccatttaatatatcaatataaggcattaccacaaagatttttaaatgcttagaatagaattgaattaaactaattttaatgtagatttatgactgaaataaatacgtgctttgctgcatataatttttcaaaggcttacccattttataattttctgatggcatttagaaaggttcttgttgtatgcccaaagagcgtaattcctctttccattctgactagaattaatatgttctgtagcatatatgtattataaatatttatatgtacatataaatgtatatattatagcatagtaattaacaggctattcaatttaagattattttaaattcctcacatatcaaaatctgagttatttagacactttatgagttgcctaaatttgaatcaacactattagttttctaaagttgcgtaatttgtatttaattcattgttagttttctgaaactagtaatccaacttagtattgggatttctgaggtcctaatctgccagtagaaagaaggcagttgaaatattttaaaaaatcaatccttttttttatttgtgggcaaaagacatgtaagtgaattagttgattaaaatataaggtatttttctacaatacaaagctatttttatctattctgtgaagaaatactggcgagttgatgcttaaagccctggaaatatttatgttttagcctcagggaagatttatgttttggaaaaacttacagttggctcgttcgacatggaggtgatttatatctctttcgttagatgattaatttgagaataactccttctgcccttttgtttatagtttgcttctgtttcaaaaggcattttaaattgttttcatcaaaagtccaaattatgcattttaaacctcaatcagtaaaactttctttcctaaaagtgctatgcattgacaatttgtgacttttacaaaagagttattttatttcatgttgaaatactcagcaatctagaaaaataaattaaaatgtattttaaatgccattagaaaattataagatgggtaagccttttgaaaaattatatgcagcaaagcacgtatttatttcagccataaatctacattaaaatcagtttaattcaattctattctaagcatttaaaaatctttgtggtaatgccttatattgatatattaaatggaactaaaaaatgattggtctctaaaaaggattcgaattatattaattccaattaactgattttaacaaaccaaaaacccatgcagcttagctcaggaattatacagatcaagggaccaggctacctgagtttgaacctaaccatgtttcttgacctttctgtgtcatctataaaatgtgatactaatatttcctattgtatagtgttgtagtgatgattaagtgagttaatatatgtaaagattttagaacaatgcctggcttctagtaaatactatttaactcttagctattgatgttattgttagttaatatgctaaatgtgaatggcaaaaatatcaatagcaatgagcctaaagttctttatgaaataattgctgacaaatgtttatagagaacttttataaaatcacaggatttttatgggtagaattccttcatcttaagaaaactattaactataaactgaattctaagtattccttttataaccagtgtaaacttcatgagaataagaaccttgtctatcttatttacaactgtatccccagagactaaaagtatttgatgtagtataggtactcaataaatatttcttcttcataggtagaggaaacaaatattttttactgacaaacaaattattaaagtaaaatatcacccaatcctacagtgaaaatatctacagaaaactataacatcacttacttggatatcataatgaggaggagattccctctttccagctaccaaacctaattaatttaggacaggtggtcaccttctcccatattaaaaattttcagcaataacaatattaatgtcacttactacccctgattatttttgatcaatttgaaagtcacgctttttgtgagaaacaggaattatctctttaagactcctattatctgttcattattctgcagacatgaacaaaagctttatatagcttaatccattactaaagtcatattttgcaaaatagagaaacactggatgtaaggccaggaaaccagattctatccttaaatatgaactattttgatttatttagttattttagcttgggcatatcacttagtaatatgtaagggtcaaacaggatgttgttaaggtcattttcaactctaaaattctgttattttctcttttacctttcctaaggaattcaatttcctttagctgtataccatctaatatctatctccttaataatattgttcttttccttaaatcccctctattttatcacattattttaaaaggatagagaataaatgtaaggaatatttaagtcagacacatgcccaatatagagaaaggattagacttaccagtgtcaagaactgtaaaagatatgagattttacccaacttgaataataacaacttagcctgccacagtttcatcaatcctggcagaagacatgaaacttctgagtcagagaaaaaggcattattactcatggcagcaagcagcatgagccttatgtttgttttggttgcccttgcccccaggtaccagaaacaacccaggtaggtgccacatattcagtgggtttgcatcacagcaaagtagggaaggcaaatttttaaaaaatggattgcaggcaaacttgccctttgccaaaagggagactttatctttaacattctaaacagtaagcaaatctatccttgctttgcggcataaacatcctttaaaagatagcccagaacaaaagggtggttagtacctccctcgtaagacatgcagaagcacaaaagcctcatggaaagacccattgtctctcaacaataccatttttcatttctatactgtcttggtgtctggcaaattttttatgagtataccactccattaacagctctgattaatattatcaatagagactgtgaccaaaactattcaatttgtctcatatagcatttaattaaaggctactgttaatagaacgccaagcaagtagatgaggccagcctgcactattgatctcaaccctgtcccccaggattgcaaactcaaacagccgaatagatcccataaatcatccaagtctatcttagaaagccagatgatttgctccctacgtttctgaattggcctttctgcttgatttgaggcattaattcaggaacatcaacaaagacaaggacattttttagaaaactgcaacagactcagtgtgtctccgactttggcccaagtgggcaaccataaggatactgagctaacagtgtactaaaccaagtagtctttatctttttttatttaggaccatgtcaaggaataagaatatccagctggcagagccagaattaagtttgaatcctctagattcccttttggctaggtttctaccctacaggtgtaaagatagttcagaacctagagcagttagtgcctcactcacaagataaatagaaatgcaaaagactcagagcattgttgccaacaaccagctcttgggcattgcatttgtttatgaacaaatattagcaaatgttgctcttttgtttaccacaccatggctaactataccgctgactcattcagcttacaatcagctctagtcccggagtatctttttttctggtgtttttctattcttacttctcttcagtctatactgttgatttttcattccatttcttgtagaatgctgtcctatttcacagccacttcttagtttcctatataatctattctggaaagtttaataccttcatgtatcaaaaatgtcaagggtcactctgtgtcttcactctgataatattgacctgaatccccagtaatggattaagataaagcacattcaaatatatcttattttctaaagatttatttggaagtgcaagtagaatatattagaagtagatagagtttgggggtcagacatacttgctttaagagctcagctccaccatttatttaccatgttatctttagagaattcatcttctcatctataaagggaatgcttctatttcttagagttgttaaaattaaataagatcatatattaaagtaactggtggaattccagacacactagcaggtatgcaatacatatcaattctctatccccttcttaatttactattgtgaatgtgtggaggccatcaaagaatgtattgaaatgatattgaaatgttgcactagggcttccacattttgcttctgtgcaaacatggaagtctttttgtatgttatgcattattattttacttactattatttgcttgttatggttctgtaatatgcactctatatctgagaatataatgaatctcaaattatcttgatttactcaaggacttttttagaaacttgaaaataacattctgattgctccatttcattgaaatattaaaacaccaattgtaatttactttcatgccaactttctagtgactggtaaattgaaaattagggtttttttctgactttgatagattcacaatctgattatttggaagtcacatactacccatgttaccaacccaatagactggaaagtgacactggaacaacctgagcatgtatgtaacacatcataactaatcttattaatgccattagtactgaattggagttacactgacacaaccttaccttatttagtccataaaattaggtagttcgaccgattaaccctgtttctaaaaggttatgtttaaagaaatatttgtatatagacttattttttcattgacctgcaatataattcccatagaaatgaagttagccctcagatgtatttagatatcatatttctaacatttttaacgttcagtcttttttgtcaatataaaaattgccagcatatatttttccatttaacacccacaaattgtgaataaataaacaatgcaactacatttcactttatttagtgcatgtattaccaaaattagccatattgttaattcttaattcatagggagggagatctcacagattttatgaatgaagaattaactataaatatttaaggatccactctggcattttttcaaatgttctgcagaattaacaagacttgttcaatttgtaacatcattctgcctgattctgtcaccaataagtacaaattgagtctaatgacaaaatgataaaaagatattttggccaggtgcagtggctcacgccttaatcccagcactttggaaggccgaggcaggtggattgcctgagatcaggagttcgagaccagcctggttaacctggcaaaactccgtctctactaaaaacacaaaatttagctgtgtgtgatggtgggcatctgtaatcccagctactcgggaggctgaggcaggagaatcacttgaacccaggaggcggaggttgcagtgagctggaattgcgccactgtactccagactgggtgacaagagcgaaactcctctcaaaaacaaacaaacaaaaaagatatttcacatgatatgaatagccattttttgtcatccaaattattaacaaatcactgcaatttcagaaaagcttctgttaacagtaatgacaacttatcatctttgtactttagaataagttgccaggtatgaaaattagggcaattccttactatttcaagtgctaaatttgaatctgtatgtaataagtaaactttgagtattagcttatttgccttaacttgtttaatgttttaaataaaattgtagtacttttcaagtaaattcatttacaggattaaagaatcaaacagtactgttaaaggcttataataaaaaataccatttcaataaatgcattggggacaactacatagcatttgggaaaacacaaatttgggtttgtacatgactactgtgacaatgtaaatatcagatggatcaagattttaaaggtgaaaactaaaccacaaaagtcctaaagaaaacataagaattttaaaaataattaagcataacttttaaaatatattttaaactggaggtataaatagaaaaaagatagtatattttactgcatgagcaaacaactcctatataggggaaaaaataccccactaaactaaatcaattggccagctgggaaaaaatatttacaactcacatcataacaaacaactacatatccaaatatagagagaaattcctccaaatcaatttttttaaatcccaagaagaaagaataatatggcttttaaacatatgaaatagacctaaattcactcatcatttaaaaaatataaagtaaaacacctctgtgatactagttttcgcttataagattggaagtggtcaaaaagtttgatagtacactatgttagcaaatgttgagaaacatacctatacattttagggcaagtaggtatggatataatctttatggagggcaatttgatactgtctgtcaaagtttcactctaggctcattcatttataaaattacacatgtaccaggttgttcatttccatattgcttgtaatagtaaaaaaaaaaaaatagagacaacctagatgtctagctacagatgaatggttaataaagttataaaactttttatttaaacaaatataaaatgttcacattttttggcgtggcctggtggctcatgcttgtaatcccagcaccttggggggctgaggtgggtggaacacctgagatcaggagttcaggaccaacctggccaacatggggaaacctcatctctactaaaaatacaaaaatcagccaagtgtggtggtgggttcctataatcccagctatgcaggaggctgaggcaggagaatcacttgaacttgggaggcagaagttgcactgagccaagatcgtgccactgcactccagcctgggagacagagcaaaactctgtattaaaaaaaaaaaaaaaaaaaaaaaattcacattttaatgactgtaaatattgtcatgtgcagagctaagtggtgtaccttttctttcttgaatagtttgtcgtttgtttcggtttgttttttttctggcatttctaattctttctactttccctgttattgccttccatatttttcaaattttctcattgagtttcttgttttctgagagtatcattcagacctgctattccatctgttgtagggagctttctaagccatctgcagaattcccattctgtgactacctttatttttttctctgagttgattccactgccgcttgttttccttgtcatctccattcttggttttactccttcgtttatgtgaacatacctttatacaaattatggaaaaaatttgaaaggaaggtacgtcttctgggattttacacatctaaaaatgttttgttttgttttttcactttcacacttgattgatagtttatctgagcatagaattcttgcttgaaaattatttccctaagaattataaagatttttcttgagtgtcttctaacacatgttgctgctgagaagtctaatgcctatggattctttttcctcttgtgctcccaagaagagagaaaacaagaatactttcttctccagaaagtcttcattcaagaaagcagaagggagggacattttctacatttcctttctggttgagtagaactacacttacctctcctccttcacctgtgccgtgtgattcatgattgagccttatgatctatgagagcatctctatgtagtgatgaagcacttgatgtttagacattcttctcataatagagcctactttttcagaccattgtcttgtgtgaactcaacaatccttatactattgcaatcttaatcctcctaagaaaatggatgcttctggcagaaaggaggaaggccagtagaaagaagttaaaaagagacgatacttcaatctatatttttaaaacttaaaaaaaaattattacagcatggagcatttttctcctcttaaacgtttgattttcaacacctcactcaattgcaaattgagtgatattgtataaaccatcttcacagttatcagcattaaatacctaggtctttcatgtagtatgtgagtatttctgtactgatttattttttaagccaaaaattactagattaagtttcccatggtctagtcatttatgttgcataacccaaatgcaaaagttacccatgatattaaatttgaaattacatgtatatcatgctgcccattgttccaaaaacattggaagacattttaaaaccacatatgtatagattgttccttctgtctgcagtagaaccatgttcatgttttcacgtggccactgacctttggcaaagccaattcaaaaattcagactattatcatcatcagacaaatcattaaaatggagtcaatcatacacccacttgcataaatcattaagacagatgatacaaatggatttgacagaccatgacctaccaattttttacttgtcaacaaagcttagagttaactgaaataaaaccatttcatttagtaggttactgccaaaatataacaaatctatacaaagtttttcatagtcaagaataatttaaaagacaaaattaccaaaatatgaatgtgcttatgataaataagtgctagtaaacccagaataattaccaaagctaaaactacaccattaaaaatgatataagcattttaaataacttgattgtttctatttttagtagttaatggtttgtatagatactttaatctcttctgttcatgttgttttttcagaaaataagtacttaatcctaatcaatgtgagataaattaaggaacgcaggttatatttcttcttttaatgaagggcaaactcctccagatgtaagcatagcatctatttgcagtactgccacataagaagtaaaaatagcttggattattttggtatcaagtaggatttgtagatgaagaatattatctaaattggattttccatagctatggcagttaatattctaactgctgcagaagtaccaagagaaatgcaaagaatcagaatcttagcagtcattcatccattcgacacctactaactgcaaggcacactgctggataatatgcagtatggaaagtgaggacatacacaacttaaaaaatggaaagtctcataataggagcaaaaattattgttagaagagtgcttatgagaagtacagatatcacaacatcattccagattcacagactctatgttctattattcaattaaaaatgtttttagctttattggcttaaacaatagcgacagagaacaagttatttcaggacctatataataaaaagataagttttctgagttcaaaaaacatgggaaaagattatgattaaaatatattcctgcaaccacatggaacgatcatatttcattgtgtcccatgtctgaaatgattccaggtctccatatgaaattgttaagttttaaaagcactatgtgtaacctctaatttttaaatttttgaaggcaggataaaattgttcacccagttagggaactggtttactacaattggtaatgattgaatcattcttgtccaccctaatatttcacgagattttctttctagcacagctcttcctattctctcttatcagtgcttccggggagatttgtcaaggcctttattagtgtgtggaagagacgctagtgttccttgtttcacagatatctatttcctagtacacactgactactgattttgataaaatgataggcttttatacaaacatagaattccttttctaaacacttgtgcacccttaggaaaatttttttcttatgataattggataaaataacataacataaagctggtcaccctctaatttattaacataaacattcttaaattctacttctcagaactaatgtaaaagtcacttcctttctggctgctctagaggttaaaaaaaattatggcactaatagagaagtgaggaaagttaaaattaaaaaaaagaaaaattacttcttgagagtggactatatattatatttttacttatttgcttttttcttttataaaactcatttcctatcctagaacaattcattttcaagagaagaaagtgcacgtataaaacaaaatttcattccgatgtccccaacttaaaactttattcctgttattcccatgttaaaggcacaaaattttctgtaaaaacagataaattctgttttccattttattttcatacattctatttgaaacacagaaaatcccctagtagtagtttagaatttatgcagattctagttaatcttatgtttcaagtctatgaagcatattctaaagcaataatcataacacttaaaatacacttgcataacatttttgttgaagtgggtattaggtatcatatgcactgcaacattcctggcaagggagtgcatgtaatactttaaaatgaaacttccctttttcacttcagctccttttcttgattaagaagctgtaaatgtatcttgcctcttttcacaaatgaaaatgtgttcaaacgtaattaatctaccctattaactctacaaaacatctgctatatttgttaaacacttcaaacttctgttctgaaccagttaattctaagtaatttctcagttaaatatttacatgggcttccatgatgataagctctagcttgtcttaaataatcagcagattgtccagagagagctgtgtgaaatgtaacacattgtaatagctatccactggaacttaaaatggttagctggcttggactattttttgcttatttttatcttagccaaaagaggtaacagccttatgaattccattctttgtcaatatttttaatgtccagaattgtgttaaacggaaaatgaatacctatgtagacctatgcagatgtttaccttgtgaaaatgctaaatccaatctcaaatgtctctttcagaaaagtgataaatctgtatgtgtgcaaaattttagaaataactcaatttacagttatttttatagcagactaagtaaattaaaaagtagaaaacattgataggcatttttcatcagcaaattaaattgaagaagaaaaaaaatccacaggctatgcaaatgtgtggtgtgtacaaagataattaagactatgattctctaactgcacaaattatataaatctgtaaaatatcaggttttggtcaaaaattggaataagttccacaacagagatgctgttacaatggtaaatgattaatttgtaaatgaactataaggcaatttttctcatagacatcagagaatagaatgatcacttcagactgaggaagacagacaagattgaaagttctccaatgtggtaattaagtccaagttttgaaaataaaaatgattatataaagagcagatgccagttctccaacaccaacactcagtattgttctaactaggtgttttcttctttacaatatgccaaatgtttattgagttccttctataagtattgtagaggttagaaaaaaatgagcctgtatcctctacagcaggggtccccaacccccgggaaaaggaccagtaccagttcgcagcctgttaggaaccggaccacatagcaggaggtgagtggtgggcaagtgagcaagcttcatctgtatctacagccactccccattgctcacgttactgcctgagctccacctcctgtcagatcagtggctgcattagattctcataagagcatgaaccctattgtgaactgtgcacatgagggatctaggttgcgtgctgcttatgagaatctactgcctgatgatctgtcactgtctcccatcacccctagaagggaccgtctagttgcaggaaaacaagctcaggactctcactgattccacattacggtgagtgtataattatttcattatatattacagtgtaataataatagaaataaagtgcacaaaaaaatataatgtgcttgaatcatcctgaaaccatgcccccatcagggttcatggaaaaattgtcttccacaaaacttgtccttggtgctgaaaaggttggggaccgatgctctagagctcacggtcaactaaaaggataaatgaagcacacacataatgacctttacaaaaccagaataaggaagaactgtgggagggattctgagacaaatgctgagctctatccaagttcaatttacataaactggaggttaagtatgtctgtaattttcataataagtgatcgataaatccactgtttgactttactaaacgggaggaacagtgtcctggatcattataaataatcctcccagaattttaatttgttagtttgggaatagatattatttttctacagttgattgatctgtgttttactaatgataatattaaaattatttttgctttgtcaatttcaactaatgttcaatactcttctcaaaatgttctgaagattaggagagcatggctagaattacaaattggtcttggatcattcaaagagtgaatgattcatcaaggattaaaaaagaatttcctcaacttctaatcaaacccatagctgggtcctagacttagcaaaagtgtggaggaggagatcagagtcatggtaacatctaggaggcccgtaagtgatttatgtatgtgagtttgtaccatatcttagtacttgagtctcgcatacaaaagattatcataaatattttttgcgtttgttaaatacattccaaatcaaatattatatccttgcattaggtagactttgctacataatttctttaaatagtaaagggagtagatttttgattatatgtgtctcagaattaagtgaactccctgatgtgtatgttttagtaactcatgtttaaaaacactgaatgagctgtcagcatttggatgaatatcaaaaatgttatatattagtttgactattcatgaaattataatagttttcctaaggataagagagaagagtttaatctagagccaagatcgtgtcaggcttataaaaaaatgacacaacctccctgcaattatattgtaattaatacttgttatatttgaatttcaaaatttgtttttcttataaacactaggaatttgccattttaaagttggcctaattatccaacattacttgattatatatcatttggcaggttttgttgtttttttgtttttaactacaaacagaactgattagtttttttcccttttttttcctacctaaatcaataaaacatagactccatatgcccctgtaacattaaattgctcccaaagtagataaaagaaatgagagtgataaatacataaatttcattcaactgttgtggagaaggagtaacaaagatttgggggaacagtgagaactgatgacatatgcagaattttttgtactaacactttaaaaaaattagttacaataatttatactgaactctgagaatattaatcaaatgaaagccatctgatttaaaaattaaaatacgtatattacttttttattcaaaataaaattagatggtgaaattaagcatgtatgacattcatgaaaatttagtaataaaataatttacagacaggcaaatgctgagagattttgtcaccaccaggcctgccctacaagagctcctgaaggaagcactaaacatggaaaggaacaactggtaacggccactgcaaaaacatgccaaattgtaaagaccatcaagtctaggaagaaactgcatcaactaacgagcaaaataaccagctaacatcataatgacaggatcaaattcacacgtaacaatattaaccttaaatgtaaatggcctaaatgctccaattaaaagacacagactggcaaattggataaagagtcaagacccatcagtgtgctgtattcaggaaacctatctcatctgcagagacacacataggctcaaaataaagggatggaggaagatctaccaagcaaatggaaaacaaaaaaaggcaggggttgcaatcctagtctctgataaaacagactttaaaccaacaaagatcaaaagagacaaagaaggccattacataatggtaaagggatcaattcaacaagaagagctaactatcctaaatatatatgcacccaatacaggagcacccagattcataaagcaagtccttagagacctacaaagagccttagactcccatacagtaataatgggagactttaacaccccactgtcaacattagacagatgaatgagacagaaagttaacaaggatatccagaaattgaattcagctctgcaccaagcagacctaatacacatctacagaactctccaccccaaatcaacagaatatacatttttttcagcaccacactgcacctattccaaaattgaccacatagttggaagtaaagcactcctcagcaaatgtaaaagaacagaaatcacaacaaactgtctctcagaccacagtgcaatcaaactagaactcaggattaagaaactcactcaaaaccgctcaactacatggaaactgaacaacctgctcctgaatgactgctgggtacataatgaaatgaagacagaaataaagatgttctttgaaaccaacgagaacaaagacacaacataccagaatctctgggacacatttaaagcagtgtgtagagggaaatttatagcactaaatgcccacaagagaaagcaggaaagatctaaaattgacaccccaacatcgcaattaaaagaactagagaagcaagagcaaacacattcaaaagctagcagaaggcaagaaataactaagatcagagcagaactgaaggagatagagacacaaaaaacccttcaaaaaattaatgaatccaggagctggttttttgaaaagatcaacagaattgatagaccgctagcaagactaataaagaagagagaagaatcaaatagatgcaataaaaaatgataaaggggatatcaccactgatcccacagaaatacaaactaccataagagaatactataaacacctctatggaaataaactagaaaatctagaagaaatggataaactcctcgacacatacaccctcccaagactaaaccaggaagaagttgaatctcttaatagaccaataataggctctgaaattgaggcaataattaatagcttaccaaccaaaaagagtccaggaccagatggattcacagccgaattctaccagaggtacaaggaggagctggtaccattccttctgaaactactccaatcaatagaaaaagagagaatcctccctaactcattttatgaggacagcatcatcctgataccaaagcctggcagagacacaacaaaaaaagagaattttagaccaatatcccagatgaacatcaatgccaaaatcctcaataaagtactggaaaaccgaatccagcagcacatcaaaaagcttatccaccatgatcaagtgggcttcatccctgggatgcaaggctggtttaacacacacaaatcatataaacagaaccaaagacaaaaaccacatgattatctcaacagatgcagaaaaggcctttgacaaaattcaacagcccttcatgctaaaaactctcaataaattaggtattgatgggacgtatctcaaaataataagagctatttatgacaaacccacagccaatatcatactggatgggcaaaaactggaagcattccctttgaaaactggcacaagacagggatgccctccttcaccactcctattcaacatagtgttggaagttctggccagggcaatcaggcaggagaaggaaataaagggtattcaattaggaaaagaggaagtcaaattgtccctgtttgcagatgacatgattgtatatctagaaaaccccatcgtctcagcccaaaatctccttaagttgataagcaacttcagcaaagtctcaggatacaaaatgtgcaaaaatcacaagcattcttatacaccaataacaaacaaacagagagccaaatcatgagtgaactcccattcacaattgcttcaaacagaataaaatacctaggaatccaacttacaagggatgtgaaggacctcttcaaggagaactacaaaccactgctcaacgaaataaaagaggacacaaacaaatgggagaacattcaatgctcatggagaggaagaatcaatatcatgaaaatggccatactgcccaaggtaatttatagattcaatgcaatctccatcaagctaccaatgagtttcttcacagaattggaaaaaactactttaaagttcgtatggaaccaaaaaagagccagcattgccaagtcaatcctaagccaaaagaacaaagctggaggcatcatgctacctaacttcagactctactacaaggctacagtaaccaaaacagcatgatactggtaccaaaacagagatatagaccaacggaacagaacagagccctcagaaataataccacacatctacaactatctgatctttgacaaacctgacaaaaacaagaaatggggaaaggattccctatttaacaaatggtgctgggaaaacgggctagccgtatgtagaaagctgaaactgggtcccttccttacaccttacataaaaattaattcaagatggattaaagacttaaatgttagacctaaaaccataaaaaccctagaagaaaacctaggcaataccattcaggatataggcatgggcaaggacttcatgtctaaaacaccaaaagcaatggcaacaaaagccaaaattgacaaatgggatctaattaaactaaagagcttctgcacagcaaaagaaactgccatcagagtgaacaggcaacctacagaatgggagaaaatttttgcagtctacttatctgacaaagggctaatatccagaatctacaaagaactcaaacaaatttacaagaaaaaaacaaacaaccccatcaaaaagtgggcaaagggtatgtacagacacttctcaaaagaagatatttatgcagccaacagacacatgaaaaaatgctcatcatcactggccatcagagaaatgcaaatcaaaaccacaatgagatattatctcacaccagttagaatggcaatcattaaaaagtcaggtgctggagaggatgtggagaaataggaacacttttacactgttggtgggactgtaaactagttcaaccattgtggaagacaatgcagcgattcctcagggatctagaactagaaataccatttgacccagccataccattactgggtatatacccaaaggaatataattcatgctgctataaagacacatgcacacgtatgtttattgcagcactgctcacaatagcaaagacttggaaccaacccaaatgtccaacagtgatagactggattaagaaaatgtggcacatatacaccatggaatactatgcagccataaaaaaggatgagttcatgtcctttgtagggatatggatgaagctggaaaccatcattctcagcaaactatcacaaggacaaaaaaacaaacaccacatgttctcactcataggtgggaattgagcaatgagaacacatggacacaggaaggggaacatcacacctgggtcctgttgtggggtggggggagtggggagggatagcattgggagatatacctaatgtaaataatgagttaatgggtgcagcacaccaacatggcacatgtatacatatgtaacaaacctgcacgttgtgcacatgtaccctagaacttaaagtataataaaactatatatatataaaagaaaatttagtttatatgaaaaaaattaaaaatgaatatatacataataagtaactatggatcatgataagtacatctggccttttagtttcaacgtagccatcactttttagaaaaaggtcatattataaaaatgaatgttaattatttttaaattagataacaaaagaatttcttctggaataaggggaataaatttacatttatttgcatttgtattatcagatttttcatttatttcaaaccatttaaggcatttaatagatgatgggtgaattataaatatttggaaaactttttgaaaattactgcctttatccaaaaacttttattggagtggatgagttccccatgtgaattgtcatttggccagtaacaggcacataccgtgatgaataaaatatagattctgttatagattagagcctggtgagagtaacaaatcattacatgaataatcacttaaatgaattagtggtaagtacttgagagaaaaagtgcaaggcactaggagactgaaacaaggcattgtctccaagtggtacatcagggaagatcaagcctggttttcttaagatcagtttggctgtgatgtgaatggatggaggaatgtgtagcttcaactaggaagctcttacagatgagcaagaatatgggagcagcaggagtggagagaaatggatgaatccaaacgtatcttgtagataaagccaacaagattttgtaactgtatgtgagagagaagtttaagagagttgaatgtggagaatgagttctagatttctggcatgagcatgaagagagtgtggtatggatttattgatttggggcatggtggaagaggatccagttctggagggaggatcctgagttcagcatttgatggggtaaactgtggatgcctgtgaggtagcagtggttccatcaagcacgtcgtgggtctgaatgcagctcagagataaactggagttgtagatctgggaattgctggtctagagaatccaaagcccacagatgtgtgagatcaatgtgagagaatgtggactgagaagaaaatgagacaaaaatctcccgcatttaatggttgattagggaagaaagaagcagcaggaaagaagtagtcataactgctgaagttttttttgaatggcaatatcatcatttttaatttcatgtggagtaagaatttctgtctaaaataagaatcaggagacttgactttcagattaatacctgggatttcctaggactttgttatgatctgaaaaaaaaagaatgtttattttccctaccactttatattattacaagaaagcagtaaataatatttttaatattaaaagttcaatgttatgagtaggcatgtttgaagccaacaccataatcatgcatttccttagaatatactttaaaagctactctcaaccaaaaatataattttatttatagagtttaaatgtataaagaggtatctttttctgcttgcaaatattgttaccacttatttatggtggtttgttgaaacatggttccaatcatatgagattcttcactggcggtgaacatttggtctcacacctggtgtgggtctgcctttttttctttctggagttagctacaaagaagccagtcaaagaagggcaattcatcattattaatatattatatagttcaaccttgaaagagctcaaattactttaaaagtttgttttaatcaacaaaataattattaattttcacaacattctttgtgaggcaggtgtacttgaaacagtgtattaacatgtgtctctttttcctcatagggttccctggggatacaaggcccccaaggtccacctggaaaagagggtcagagggtaagtaaagctggaacaactggtgggcattactaacttaggggatacttatttgggaacactaatgaaaatgaaaccgaaatagagcaagcagatgggcatatggagagtatcaattatccaaaggctgaaatttgagattcgagattttgacagaggttttgcaattcagaaaattctatatttttcaagattggcagcacaagtgtagagatattgtttggataaaatgaattagccctaatttgatctacactactttggtcatacttttagtttttgaattaagttgatgagtatctttgtggaggtctagcctatttattaattccataaaggttgtggatattaactacattctttatccaaattaaattattgacttcactggcttttcataactctcctttcattgccatttattgcctttaactgagacaaaatagtaagcaaataaatcatcgttggaattggtagtagagcaataacctcctatttctagtgcagttcaatttcatcattccacagtaaaacgaagccctgcagtgttatgacaactggtcagcttcatatgagcagtggggaccccattcttgtgttttactgttattattatcattttcaaaccattttaaagtctcaaaaaatcttgtgtgttctttctcatgtgcttatttatggcagtctttgtactaaatagtacaggtactgtcaacttctgttcccttgttgatgagcattccatgacttagagtttagatgatgtgcctaaacttgagcttctgactgtagtcctacgttctcttttattattaaccccaaatatgtttcttagacattctcatttattattcccagttctgccttctgtaaaataagtctctttcctcaactacaaatatttgagggtcagtggtgtattgtactaaggtttaccttttatcaagttaataaaattccaattctcttaacttgttctcttatcgtatggattctggactctccaacatgccaataatctttgtcagaaaacactcattggctttccagagttgtcgagaatgagactggatacatgtggtcttacttagggcagagtaaaatgaggcaagtacgccccataccacagacaacatgctactattatggcctaagattgagccaatgctcctttgtctggtattgtacttttgacttgtactacatgtggtcaattaaatgctcctccctttttattttaatgaaaactgctaagtcaggtcttcacccagcccgttgttgtacagttacctttttgaatcacagagtaggaactgatccttgttgttaaatttcatctttattgattttaatccctaatagcattctattctttgggggctttttgcttttaaaaaatgatttgaatcctgttttccagtgaaatatccctcagccttatgctactttaaaatttgataagcctaccttctgtcttcatttaaatcgttaataaatcctgaacagaacagggcctgacaaccctgtgtaacaccagcctaggctaccatcttttccaccattgatgtccttaaagtgtgacaatcaaatcatgtacaaatgtatttgaaccctaccaccttcccacccacatttcttgatttggcttgtaagataattatgacagacttgttagatactgggtgaactgaaaaaatatttaaatgaggctttttagaaataataatgcttcaaattaaaattgtaccctatcaaagcttgcatttcataagaaagtagattaaagaataaattaaacatgtattttccatgataataaagaaggaaatcagttaaattgtaaagttcaaccactattttatgtaaatttactccatttataaatgcgtatagtccagataattttatattacttttatcttctatcaagagtaacataatgtcagaaactaaaaaatgtaatagaacttatagacacttttaggcatagttcgtcattattgctactgctctttcccaaatgccctatttatcaaaagaagtagctagagcaggtattattgacattatccacatttacaaataattatatgcatttggattatatccatatatgctcagtgatttattctactttataagctacttgaatgggaaacaaatgaattttaaaaatgagcgttcttacatatttacatttaggtccaactgagtgccaccatttcttctcagctcaatagttaaggagtactcagctctttcagacatataaatgtatttgtacatgtatgcctgtgtatatacatatgtgtgtatacatacagatgcacattctgaaagctaagaccaataatttttctatttcactaaagtttgcagtagaaaacaatagtgagaaaaatctaggaatttaaaatcatttttatttacccaatgttaaaaacctcttgtattttaattgagtggttgaccaagaaggtattgactatcattaaggctatttaaatgaaacataaaatatgtgaagttttatgtactttattcctagacataatgactttaattaaagcagaacatttaattttaaacaaatcattaacttgttggttttcatcaatgattaaatacgtagtagctactactctaccaatatctcacaattatggtgagtttcaaacatgggtgtcacatttaaacatgctttgaaaaatatcaaacattatagaaacatgttaatattgctattattattatgaaagacataggattctgatcaatgaattctttttctttttctctaactctttgtgtagtttcctataagcataatagcaacactatttttgcaagtaccacgccaaggttctgtttgaaattttgattagttgattttatttttttaattatcatttaagctgctaaatcttagtttataaagtgttcatttaataaaatgtagaagtaatgtgcttcttacacttaaaagctattcttaacaatgttctgtgacaatatgtatctgaaatttatgggctgttttatttctcaacttcctgattttcattttttggatcttttatatgccattatttatttatttactttgtcttcttgaagccctgcaagcaaaatatttggttgacatattttttagtcttacatcctttatggattcacacagtttttagaattcaatgaatgttgaatattgatcctaagctacagatgagaatgtttcagatcacgatgagggagaacagaatggcattgggggttgggggccttcctggaagttaagagggggtttaatccatcatgaggcagaaaaaggccgtacagaaccaagaagtcaacagaagagcggttctagattcttgaagggttcagcagaattaaaatttggaacaaagtaagtggagggatgctggataagagaagtggctggaattggtgccaggggagagaagttcggttgagtagtgaggagggcactggaaacaaaaatctcaagaaaatgtgtaaggaaattagggcatgagttgtgaggtaggagaggcaaacaatggagattgtggtggagggaaaaggacaggaactggatggaaacccagagaagtatctttgtgaaaagtggaatatttcaggtagcagatcatgttcatggatattaatgagaaacattgcaaaagaactggcattataaaaattccatttaagatgtaggttccttgcaggatttcttagtattcctaacaaacagactctccccaaaaataatgaaaacaataatttttatgtaaccttgaattttcattttatagtcacattaaatgcacatctgaataatctcaaggttagcgtgaagctaccctggtctttttaaaagaagttcctctaggtctctgaaaaaagacatttactggtgaatcaactagttactgccgcaaacagaagtttgtgtggttggaccaagatgacacctcactcttgcactctgttgctggatcctaattttgatcctgaacagaaactttatgttttaaattccctgtaacttacccctctatcctgccctgtcttgctctcaatttatcctctctgcctgtgcctgtcctttttcccctctctgggcaaccatcctcttgattgcctccttgcaacatttttgtgcaggttttactttcccttgaagtgcttgctccaagctggctttgaagctgtgtctggagtcaggattccttgcattctaaacagcacagagaacatcaacctacctacccctgcccccgtcaagatgtgtttctttgcaccagcccacacttgatggcaaaggggctgggtcacatttcctccatgagctgggagcctacaaaagtacaggagggcagggcaagcaacatgtccactttcatcttatggtgcaagcaacttggaatttagcatacaggttgcaccacagactttggggccagattgcctgaattttatttatttatttatttatttatttatttatttatttattattgagagagagttttgctcttgttgcccaggctgcagtgcagtggtgcagtcttggctcactacaacctccacctccccagttcaagtgattctcctgcctcaccctcccaagtagctgggattacaggcatgcaccaccatgcttggtgaatttttgtatttttagtagagatggggtttcaccatgttggtcaggctggtctcaaactcctgacctcaggtgatccacgctccttggcctaccaaagttctgggattacaggcctgagccacagcgcctggcccagattgcctgaatttaaatcccagctttactgcttatgagctttgtgatcttgtgtgaattcctcagccactctgcacctcacatgcctcttttagaaaatggagatgctaataacgcctaccccacagggctgtgatgaggagtaatgccatgtcggtgttagcctagtgatctcaagatgtttatagaagggaatgtaggtatacagcttcagaatattagtacttgattaaggagaatgtctaattgatcaagaaaaaatatttaagataaaatgacttttttcactactactctgttgaatctattttatttaaattttacctgaatcttactttacctagatgtccatgcccattttctaatgccccagaagcttgaggcccagtgttgatctaacttgataataaaattaagtatgtaaaaatgtctgcaaggtagagtagactattgccttttccttaaagaaagatatgaagattggtgtcatcactgtggagtagctgagacctcaaaatttgtttgatgaacaaattgtgctgatcatgtgtaaatttactgggattttcatgtaaaatttacacttggtttttcttttggtttgattctgaactggttgatatactttacctaagacagcacaagtaatgaattatgttattaataagtactggggtatattgatctcattaggtaaaaggacatcaaagtcattgcttctatgaaatcaacacatacaacaggactcacttaagcaaaattttccttaagcttatttgtttttacagggcttgggatatttttcaagtgaaattgtgccctcatagtctagccatgctctatgaaaactttgtagaacacagcaagacagtaatgcaggtcagacctgcctcacagtaaagtaaaaaaataataataatagtgtttcattgggcgcggtggctcatgtctgtaatcccagcactttggaaggccaagacgggcggatcacttgagatcagaagttcaagaccagcctggccaacatggtgaaaccctgtctctactaaaaatacaaaaattagctgggcatggtggtgggtgccagtaatctcagctactcgggagactgaggcaggagaatcgcttgaacccaggaggtggaagttgcagtgagccgagattgtgccactatactccagcctgggtgacagagcaagactccacctcaaaaaaaaaaaaaaaaaaagagagagaaagagtatttcttcttactttaagatagcttattccaagttaccaacttcacagctacaaagtgatctcattgttccaatgaaatgatttcagggtctggtagaaaccactaacaattgtctgcagttgcacatccttacacaggcttgaattttagagaggagtcttatagagaaaagaatggataattatgaatttataggaagtaattttgttagtttcacattataacaggtgatatgattgtcttcttatctttatgtgtcaaaactgacaatgacctttaaaatgcacgatgagtgtttcataattctgctctcactaaaacgatgactggtgtccttccaccaggaatttgtattactagcaagaaaaagtcaaaaattactttaaataatagttttaactctggtcgtaggtagaaaaaaagcatcttttttgcttggattcatctataaatataaacgtataccttaaaaataacacgttaaatgttctgtattctacaactattggttcatgcttattacttgttagaaaattcttggcatacagataacatcgtattttatttacttgctatgacatttcttcagaatgtctccatgaggattatcttgggagtttgcaagagataccatccttaattctgtctgacatttctagatgaataacagggaaattgggtaccctattcaggtccaagcaacaagtgcagagctttctccaacacattgtttgaatttacaaaaccaaatatgaaactcggtggataaaaataagcaaatctgcatttatccctgcatctctgtttgcagagctccatggtggactttggccgcttggtgtctcctaaaattggatcaaatatagttactgaagcaatgtagtaagacaggaaaaagggggaaaggctaatatatgttcatgtcaaacaaatgccttcaagggcgtagttgtgcagcgaggatagtcctttacttttgcctcatattctcttactggtgggaaagataaatcaaggaaaaagatgttggaaaacaacttctagcacaggctaattaaaatcagatgaacaagagatgtagcccagactttgtgatcacaggccatcccttagataaggttaaacagcacagctagttactgacagtgtgcctgtgtctccttgtggtaaatttcactctaactagtggtctctgcagtgcacttgagatagaagagacaaaacgccctggaaaggctgtcaatgagaaaaaaaaaaattgtaagcaatgattttgttccaataatacttatatcaatagtaaagcaacagtgagctgaggtccttacattcacttaaatgaagagctgaatgacattatttgtattgtaacaaaataacataataagttttctcttttatatggattagtaaaggaaaaatgttttgtattttcaaataggaccctgagtctgaatggtttatttatttatgtgaatagacccaagagctgttctctgatgtggaagaggcacatcatctaatggggactccttcaaactggagagattcagcctctgagccgagtggctgagagcttcagaaagaagcctggagaggtgagggtggacccatttcaggaacatcaaatcatcacattttctagctaaaggggtactatagtatcattccagcccaccaaataagaaaacagagacccagaaaacattggcaattctccaaggctgcagggctatttattctaactgttctgcataatatacacccattgtctattttgtggtatcacactgaaacccagatttgcatgttttaaaatagggatattgagaatttaaccaaatcactaacttttaaaaaagttacttaaaaatcactaacttaatttttctaattaaagccacacactagaagggacaaatataggtaggtacagctgatccctttatggtctccacacattgtgatgagcacacattctgtccctataacctgcaccaacatttgggaaccagcaatgcctggccagtgagggaccagggggagagtcagaactgctctttttttctcaggagagcaattggatcaatttgtgacttcagccaaatcactcaagactctagtctaaatttatctgttttatcataacttagccctcaggtatattatgggattaagccggaagcactttaaatgcactctggtgacaggtgttctatgaaggagtcttataaatattacctacttagccacagaaacacttaaagagaatggaaaaggagaaggcacattctgccaaagtggcgatatgctaatacacctgcatcaggatctttattcagaacattacactgaacacgttagtaactatttcatatgtttaccattggaaatgtcaagtagaaagttatttatccatttgggatggagcgaatatatgtgtggatggctgccaaaaccaagaattaatcacaagttattaatcaatttggaaaatataaacagataaattttcagaaatgcaaaacattcggagcatgaaacatttttatggcctaatgactttgaaagccagcaaattatgtttccaataaataagccctcaactttgtaaaactctatagtattttgagttaccttaggtaatggcacataattctcaaagcaactttaattttatagcacttttgtttttcttatacattatattttaattatcaagagagaagctattgcaaagtaaatgtgatgccataattctttaaaaagttgaaaatttatcttttatatgatgtacgtagattgtactgtgtttttatttctaaatttcttggaatggtagtattgagagtcgctcttgaattcttcagaaataccttagaaactactttttctcattttcctcaaaaccagtaaacttttacttggactttttttgtgtgaattattgtagattaatttgatatttatttgatatctctaatatgtccaacacaaacatatacatatatgtatgtacatgtatgtaagcattatccattgtgttttctaaattcacaacagtatacaacgtatgttgtgaccactgtattatggtgtcatttttggctctcaaatcactagacaatgcacttcttgaacactagaaaggactgttgtttgtatttcttatgtgagagatgttaacaatgtgtctatgcaaccgtgagaaagatgactgcagagtatctacaagtatatttaataccttgaatgtgcataaaattcaataatgtaaacacaatttatgtgcattcaatatttttattcattaataatgccactttaagaaaatcagtcttagaacatacaatgaaaagagcaagatatcattggaaaaaatctacaccttttgttctgccatattgaaggccgttgcttcacactctccattggccatgtgttttatgcagtcttccaaatcttttgcagaaacatttccatagctttgtgcatttattcaatcatgtttatagtttatttgtcttcgaaagtatttgagggtcttataaatgcaatcaaataaaaatctctacactgagagaaaaagacaagagctaatgaatagagagtaggaaagagaagaaaataagcaaaaacacctatactgagtgaggcaactgcatttgaacaaaaagcctctctgaaagatctgagggcctatttatttactcaagaaacatttgagtgcctgttttgtgtgacataccatggaagttggcttaagtcaggcttccctaaaagcagagcctaagatgggattcttgtataagcgatttacagaagaaacctgtaacagagtgagggaagcagacaagagaagagaagaatgcaggcaaaatgtggtttcaggagcatcaagtctctccctgatctcacaagacactctggagcacgacagaatttctcctgccttgaagcaaggggcgaggcttgccctcacagggtggggagatgggcagtaacttcccagtatctccaggccaggtagatcctgtagactaaggtaaccctccaggaatgggtgtagatagaagcttgtagcagccaacacccatggcaactgagcccaccctagcctggcaccaactgcacctgtacagaggtgaaataaaacacaatccttaacatcactgacacagaatccttgatggcttttgagtgaaagtgaagacatgattttaaaaagaactttgataatattaacctcacaggccgggttcagtggctcacacctgtaatcccagcactttgggaggccgaggcgggcaggtaacttgaggtcaggagttcgataccagcctggccaacatggtgaaactctgtctctactaaaaatacaaaaattagctgggcatggtggtgtgcacctctaatctcagctatgtgggaggctgaggcaggagaatctcttaatcccaggagacagaggcttcagtgagccgagctcacatcactgcactccagtgtgggcgacaaaggagactctatctcaaagaaaagaaaactattcttgtagtctaatcaataagtaataaagggcatgattataaaaaccagtgaaatggctgatgggagtgacatcaaggagattgaatgaacacagaacaggcaaaggacttaagtttcagaagtgattgctgacgtatcaagtctgaaatgatagtgcctttaaatgaagtagaaaacacttgaagaaaacattcttttagaagagatgagtcagtttgaagcctacagcattagggctacggaaagaatctgcaatcaaaagccccttaagatgtgagctgagtagaagaaccaagtttactgttagcaagtcatcagtttaagggtgataactaaagccatcacaatggggtgagggggcagtgtgcaagggagaaactagaaagaaaagaactgaaagtagaaccttgaaatttgggtaaacctatatataggaatggggtggagagatgaactagaaagtttaaagtatagaaaagtgggagaataagaagaaagttttgaaagggaggagactgcgaactgataggaaattcttcagaggtatcggaggatggaggttgagaaaaagccattggtgatcttgaaggaagctggtttcttagcatgtctgtgttgcacagaggcagacatgacactgcacggatctcaagagtgtagtagatattgagaaagtcaggggattatgaactattattctcaaaagctgaggtgtaaagagagatggcataagactacattgggagaggtcaaggaaaatctttgtttctttttttctcataagtgtatatatatatatgtgaatactcaactacgattacaaactgaagcaaagaagtctgtaaatagggagaaactgaagatgcaagcacaacaaacaataataaattatccagacataccggaagaggccaaaagggaaggcacaggtataaacatgggtcagcatctttaccttgaggacacaggaaaaggaaaggaggggcatggacactcactttgaggacaaagtagaaataaaggcttattgcatattcacattgcatatgcatattcttctcatatagaaagaattttttagtgtagatatgatttagtaaaacatttgctgtttataagaggcattaatcacaagattgttttcaggccaatagatacacctactactttcttccctcatgaacagcgagcccaacttaggtaaaagtagagagaaatatagaagtagaggaagtcaaactaaacgatggtgaaaggggcaggccttgggataagaaaaagtctattattgcaatttcagtttaatttcagttttgctaggtttttcaagctgctggggaaaatgtgggcatttcattttatcccttttatctaagactcctttcctttgtaaattaccagtggtatcttacaagagcatttctgttatcagacatttgtctgaattcatttattttgtttcacaaattcattttgtcagaacacagttctaactccttggaaaactttgttttattggtataatataaatgaggtcagggtaaaatattgtcaaaattaaattgttcttatctttattgcttttggcaactttcacgttttatgtctctgtgcacattctgtaaactgtcatttattttttctcaaatggtataaaatttctgaagcatgctaattatgtatcgtttccaagcgaggaaatgccaagggactggcttaccatatgaagagtcctgcctgtgttttatcagtaagtccttgtggttatggtgatacatttttgtatactctactggtaacttactatgggcttaaaaacctttttcactgggagcttatgcaagtgaatgtggtgtgtttctttgcagctgttgccatagaaataaagaccttttcaaagtaaaatgaggatggcataagaattacaaattcaaaagaagttacgcttctaatttaatatcaaaaatggtgcactattccctttctttttaattttgtcaaaattgcatgacctgagtgcgtctaatatacttttattagataatttctagtatcagaaaagctaaagccgaaaaaatggaatagatgaattccccacagcattcagtaggatgggctttaatctttaatcttttattcttaagacttataatatttctaattgtcttctgcatgctctacctccatactactttctatcttattttccatttaaatctaattacctataatgggctttcttaaaaacaaaccatttattttgctttctttctttaccacatcattttcaacaacaaggcacattttctagcattaacacacacagaaggatgaacaaatctataaaactttctcagattttattactgttcatgttcagactttgaaagccttgtagacttcttttgaaaatgaaaaaaaaacctgaagcagttacacaaattaaagtttataccagaatgtaaatcaacacacagctcccttcattgagaaattcttgctaaaaagaaatgtcagcagacctaaacaataggcttaatgacatggcaaaaattgtgaatttgtaaagattaatatgttaatttggagattattttattttgagataatgtggaaaatgaccatgcatgctgaggtatgatggttattgaggagaaaaattttatcaaaaatattaggattatagaattaattcattgtttctgcaagttaagaaaccagtttattcttacttttttaaaaataaaatttgaatagttttatagacttgcttatttgtctgttatcatcagtattttaaataatgtcaatatttctatgcaaagaaagaatgtaatgtgttttttaatggtaggaaaaaataaaagagtgaacactgaagtttctagagattgttacaatattattctcatagctttacaacagttatcaaagaaacaagtgatgttcttgatattctacatcagtgaaaagttatcttcaaatatttaacaagtttgataaaacatttcaaattttattttccaccaaaagaagatgcatatataggaattctagaatgttgaatttatttatttcattgagaggttgtttaactttaataaataatttatagggtgatttgctttaactgactactgatgaagaattgaagattaattttcaaaatacagcatcacttgctccatttttaaataaaagttgtaaataatattctgagagtctaaaattacttcaaaatttcttcttccatttccttcaaaatatctttgttaaaatgatttctatcttaatgtcattaaaacaaaataatgaagcacttttttaattaattaattaatttctgagacagagtctcactctgtcttccccaggctggagtgcagtggtgcgatcttggctcactgcaacctccacctcccgggttcaagcgattctcctgtctcagcctcccaagtagctgggactagaggtgtgtgccaccacacctggctaattttgtatttttagtagagacgggtttcaccatgttggcctggccggtctcgaactcctgacctcaggtgatccatctgccttggcctcccaaagtgctgggattacaggtgtgagccaccacgcccagccaatgaagcacttagataaaagttatcctctaaaacaatgatccccaaccttttttggcaccagggatgggttttctggaagatttttcaaggactggggttgaagatagggtttcagggtgaaactgttccacctcaatcatcaggtctagtttgattctcataaggagcgtgtagcctagattcttcgccatgagtggttcacaatagggttcatactcctatgagaatctaatgcccccactgatgtgacaggaggcagagttcatgcggtaatgctcgcccgccactcacctcctgctgtgcagcccggttcctaacagtccacagaccggtaccagcctggggcctgggggttggggacccctgccctataagaaatgtcaattcaacttgaagtagatatgttaacaagcaaaaagcaggatcatgtcttacattaaaaactatataatagtgtttatttcttcaaagagtgcatataggtactttgtatgggaaatcactatttcactcatgattttttgtttcattgtaattacaaaatgataaaaagttaatgagtgccatagggaatctttatgtgccttatacacactttaaataaagtgtacagttttgtaatttttttcatttttccctaatttttaaaaattttatttttaaggcataattttttgtttgttgaattcagtaatatacactggaatttatacttcatatgtgtttatttcatttttttctagcaattcagctttgttatgttttataaaagtactgattcatgacagattggatattttaaaaaccagtcctttcccatagaattagagaagtgctgatttagtaggttgcattgattataggctaaaactgaaacaacaaaaactttatcaccagcagaaggaattcattttactgaagtatgattagttaagctttttaaaacagtttagccttgtaataattaagagaaatgtgcacttagccaggtcaattctgaaaattaaccagcaaaatatacaatgaattctcagctatgcaacatatgttaccaggacttagaacccaggcagccatattctatataaagcaaggataacatgtttcactgtctgttctgttttattcctggctacctggactagttctgctggagtccatatgcagggcaagacaaccagtagggctaaaactgattatataaatagaatttctgaaaaagtattataagaggaaagagcagtttcctccctcaactctttcaaccttttttccccccggaaaaaagataaaatgaagttaatggacaatttgtgaagaatagtccaacttacctttttaaaattggaagatcccttttacacaaagatttaaacagataatctattatatgaccacttatagctaaaacaccctcaagtttaacaaaaaggacagttatttgatagatttaggtatgtggacagccaaacaagcagaaaccatttaagataagataatccaggtaacggttggtgaagataactaactttaggatcgagtttagacttaatgttgactggcacgaggatgctgagatttaaagaagttaatatgacttgttcagagtcacaaagccagaaattggtagtcatgttcaagtctatggccgaattctgctccctcaatagccatatttttcaacccatgagttgtgatccatgagcaagtcagaaatcaacttagtgggtgacaatcagattttctttgaaatattaacaaatggccagaatacaatagaatatacaaaatggtttaaccaatgtagaggaaaatcagtgtcgtcagagagaagcctgatactgacacagaagtttctctgcctattttcctctgctcagcccgttttctgtctggaggctgccttgattcattcccctactaatcactttgattttccttctcttccagatgtacagcttgtgcagatgaatattaggtggtgggtagagatgctccctctgctgtagagtggctttggtgaagccaaccaacccacagaccttacctctataaggagggctgtttgttgtttgattagtttatgcctctgatgtatatctggttccttgaaatttttattaataaaatgtaaccctctgtataacctcaccaaagtaaaatctcaaaaggcattaattctggagtcttgcaaactcctgggtgagccctgcctgtgtgacccagggaatactacttagcctctctgagtctcagttcttcagttatacaaccgaaataatactaatggtacctaacccgaagttgatgattagaaaaatatatgtgtaaagtagccaatacagggcctatcacatgctaggtattcaataattgctaattattatatcatagttataatattaatttctaagtatttgaacataataaaatcctctagcactaaaaccatggaaaagatttagtgtttcttttggaatccgaagacttttctggatttgttgctagcacagttgcccaggaagaagtgtgactagccagtgggtgtttgggggtgaaatccagcctgtgccctgctaactactaacactgtacctcagtgtagagctgcagctaatagggaaagcactgtatctgctaaatggagctctgtctcctgagtcattaagccagttagcactgtcctacagaagcttggaagtgccagttagtagacttttccatttagtaaagtgctgaataaataaacttttactacaactggtttctttaaagtgtttgtacttctaatgatattctagaacagttttgaatttttttctctttgtcatcacatagatgcttgtaaaaccagccgaatatcaggaataaactatttataacataggttgacatggtactatttgaaatgttttgtggactgcagatgtttcataaggattctttattctttttccttccattccttgatgttatggaatatgtcagaaggcttttttaaggtcaccatatatctaacctcttgaaaacgtatactcttatttcaaagctctaagaaactggtacctggatcactagacccaaatttaacttcagcttgctcagtttacatcttaaactccatttaaaaattgttattgtgctattagagaaaagtcccatatgatacccaatttgtattttgaaattcagctggataaattgaaatgctgaaagtgagttatgctattgcaacactcaccatatattaataactgaactgatatttgcgggataaggtttttctatcagagaaaaataaaatgatgttaaactgctagattccttggatggttagttcttttctggggtgaaagacttgagcaacactagaccccagtatacacaacctcaaaaactaattgaggctttgccctataatataataaatggccctatacttttcgtatttctatattttactactctagaaatatttccatttggaaatgttacctatccacaacagaattcagcattcacagcagttaaatataacaaactatacacacccctgccccacccccctgacacacacacaccaaggataaatcttaaaaacaataatattgaatacaagaaaaaatacataagtacatatatttcttttttaagagtacatgaaacagaaagataatgtaaactcgtgagagtagttatcccaagaggaaggtgagggaaaaaggactacagatggtcaaaaagtatttccatttaatctatgatattttgttgattaaaaaattcttgaagaaaatatctcaaactgttactagttgttaatgctgtgctgtgggaaaataatcatttgttatgttactctttttacatatctgcattttaaaactatctcaacaaaataatttcaaattttttacaaaggttttatctcatgttatctacagcaaaaacaaaaataaaaacaaaaacatcaccagatcttaaagaactttcaaggcataattagtttcatggttttgatgtcgatgctcatctcaaagtatagtaatgaatgcgatcacactttttctcattagtacaaactcctcatttgtctagtacctttcaaaaagttacgtttacttccattttcattgttagctcagtccaaaaacaagaacaaatatttattgagcacctattgtttgccagaaactgctgtaggcagaggataaaccaatggacacaatagactgggaatcagcagactacagcccttgggccaaatctggtgtaccatgtgtttttttttaaataaagttttattggaacacattcatgcccatttgcttacatattgcctttgggtgcttacaatagcagagttgagtagttgtgacaaagactatatgtctcacaaagcctaaaatatttactttaaatatttcttacttttcacaggaaaagtttagtaacacctaaaatagtcaaaaacctctgccctcatggaacttacattctattatggagacagatggccacaaaataaataagttttagtgtggttgatggtgatacatgcaaccaagattaagaaagcagaggaaggggatatgcagtgttgtgtggaagtcagagaaagccttgctgccaagctgaccgtggagcaaagatctaaaatagatgagggccatgtgaaaagctgagggaagctctttctaggtaggggaagcagcaggtgcaaaggtctgaggcagaaatttcaaggaactttaggaggtcggtatggctagaatggtgaaggaagatgagaggaggtcagagagtccacacggaaaggcagagcacagccttgcaggtcattcattataaggagttcagcttttactctgagtaagggccctcatttgtctgttgtaaaatctagactgttcatttcatttagaaacagaggccaaagctatagatactgactccttaggtcaaatgctattcaagtctgaaaacttcaattctaacctcgccagcaatggtaaggatcgccacactgccagttcttaccagtgctaccaggggaagaaagcaagaaaactggtgactatatgttgccacaatttgaaaaacatttctgtgacacatctatcccataagttatccatgatgacacactagtgtcggcactagagagcacatgctatgtaaggttttatttcaggccagtaggttggcctcaataacattaaatttcaaactgaggatttggggtatatttttcttagatatttgccaagaatgtaattgatcactggctctacatctgaatgtgttcagccaccttctacgtgcccctaggcagtttaattcctctgggaatgcttgggaccttctgcacagaagaatgggtagacctttcacagagagttcattccgtggcagctaccatacctgccctccagaatttatagtctaatcatgaggaaaagatcatagaaagcccctttcaaatgtatatatttctcttaaatgcctctcagatcttcatatattctagcccactatctttaggcaggtatgtttttattccttttttttccctaaggtagaaattgctcaggctgagagattatgtgactttttcagattcacttaattaataaatgaaagaggatgtactagtggtcaggtatctggcttctcatacaatgcacattttttttctatcctgttttttaagtcaatgatcaatttgtgtcataaatatatgagttagaatctgtatcacctcaatataatatacacccttctaaaatataaagcatgactatgggtaacaagtattgaaagtatgccaaaatagaaatattgctgctccaatcatccaaagccactatgtccacgtttaatgcagacttataattcttgaaaatactggtgaactactattctcttttgtggatctatttaaatagccttatttttttgtgcagaacaaaacttatattgaggaaagaagagaaatattctaataccagactatgagctcctcgagggcaagatctgtgtataatttttctctttactctccaacatccagcatataataaacacttaataaatatacaaatgcttatcattgatacaagactgtctttatttttcccattcatttgtgttcctaagtggcagttgatttctcattaaagtagtaaaaaatctgtaacttcgattgtttccaacattagctcctgtagttttagttattgttgatttttgaaagatttaaattaagggtctgtcttcaggagctcaaacatctaaatgaacgtatgaatattgccatgtaattttatgtttgaatcccatagacaagtgactggatttttctctttgcctctggagatcttgacatcaaatagatttcacctacatgtgttttctcttttgaatggatttaaatcatatttcttcaatttgactttttccaaataatcatctggtaaaaatactttattatgtgtaagaaaaagatcaatataactttacttaaatgtatagttttttctcagttgttggtttgtcagccatgatccaagataagggctttttttctttcattaacccctcaaggctctcatttgcaaagtcaatgggacagttaggcatgtattttttagggcatctttgtagctttgattctatattttaaaagatgcccaaactatggcattatttcccataagatctctaagttattggttgatcaaaatataaatgagacaataaactacatttgcatatttctgtggatgagtttaaacatccttgtttctcctgcaaggtctttcacttgagttaggccagccaactgacatattgctcattaatcatacatattaactggagtagttaatgcttcaaaatccaacttaccattctgtccacagggactggtttgtgttttctaaatgtgatgacatatgcttcagacactgctaattaggcctttcccttgaaaattcatcctgacatgtttcaagaacacttttctcccttgagtacaagttcattaaattattaatatccttttataagtcttgtaggactacttacacaatgcagctttctctgttttcaaaactatagtttataatgaaggatgaaatagatctcacttccttatactgtatatctttttttccagtcaaaaacaatgggctgggtaaatatcagagaataatagatactatattcagttacataaaatgttaatgtaagattaaaaatattttttagcctgggcaacatagagacacccatctctacaaaaaaattaacaatttgctaagtatggtggcacatacctgtagtcccagctacttgggaggctgaggcaggaggatacttaagcccacgaggttgaggctgctgtgagcaatgatcacaccactttacttcagcctgggtgacagagcaagactcttatctcaaaaaaaaaaaagatttgcacatggaaatggaaatggaaatgttatacggtcagctgtttgtatctgtgggttttacatccgtggattcaaccaaccatggattgaaaatatttgaaaagaaaatatggttacatcttactgaacatgtacagacatttttttggtcattattccccaaacattacaatataacaactatttacatggcattttcattgtacgtattataagtaatctaaagatgatttaatgtatatgagagggtgtgtgtagcttatatgcagattctataccattttatataagatacttgaatggctatgaattttggtattggacagtggggatctggaacaaatctcccacagataccaagagatgactgtacatataatcgactctacacacctgtaaggaagtgttataagcaatctaaaacagataacctaaaattagttctattgagcttctgtattaaatgatgaatttggtggcaattttaccttctggcctattatctacctaagcaggtgcttataccaacctatataatatgacctttttaagacgaaactcctaacggcttcacatcacaatcacagtaatgaaactcagagcactcaccataatctacaaggcccagcctaatctggcctgcctgccacccaaccacacacttgctcttctctagcaacctgtgtttctttctattccttgaagaatttgttcttgctgttccctctactggacagctttccctggatgcacctggatgctctttctcagaccttgcatgatccttggactcactttgttcacatttctgctgagggcttccctgatttttctatctaaaacagcacaccttcctgtataactctgtactgccttaccctgctttatttttctgtatttcctatcactatccaaaattcgtatctttatttatttagttcttagagatgcaataagtatagcctagtggtaatggtcagagatgatacagccaagttgcctggattcgagtcttaactctggtgtttactggccccataaccttgggcaagttatgttgtcactaatttgcctcacccttaaaatgggaatacctcaaatatattttgaggattaaatgaataaatatgtgtaagtttctttgaatgatatttggcatctattactattattgtccccactggtatataagctctattgagacagaattcaaggtatttccagagcatggtaaagcatctaacccacaatagggacttcgtaaatacttcttaaattaatttatgaacaattctgggcacatgccagctgaaagtggggaaaatatcttataaaaacacagcgaaaagccagcaggtgaacaaatagagtttaaaagtcataatggaaattttatgtagttgagaaagctgagttggttatgtgagttttgtaaatgtaaatgcatatgtactagatgtagcaggaatgaggggaacaagatgtatttagggtttctgcctttaggatacttccctagaggtgaacagagaaaaagtcaaagaacataaaaagaatctggcgactgaccaacaattgctgccggcaggaccaactgggtcaccagctttcccaggaaaccctaaccttactttgggaaatgttggatctgatgggagctgagggaaggtaaattgtaaagcacagacttcaaattacttttacccagttacagcttcaggtgacattggatgttaagtttaaggaagcgaaaagtagtattcaaataaagaaaaatactctcggttttgtacaatagtatgtcccaagtgttcagtttttaaaggtcatcgatacattttccaaatatttaaatcaatcatgcaagaaaaagaagtggtgagctgggaaatgccgtctgaacacacttgatctaaagcctggggataagtatcagaagagaagagaaccgaagagcgcacacacgtctaagacaggttaccgcaggtgcatccagggaaagctgtccctgtttgaggacttttcaggggatataatgtcccaggttgttgctgaggttatgtaaatgactttttctacccacattttcctcctatccccatgatccctccactccagagggaaactggagtgctgaggtcatctataaccaaatgaacaagtctgtctaaatgcctgttgcaaataattgtcccttctcttccaccatgaaggcaagctctaggtcttaatcatcttaatatattttccccaacacagcaggtaaaacagacagtaaatttctgccaaataaaacttactcacatctttttgatagggtttttttctgaaatcagcacttaagtatcaaaatgcaatttaatccattaaattcacttcaattaatagagaattacataaggaaaatttttccatttcaaaattgggtgacctttatagttccacctcactgatcctctagagttctcttcatttgtcagacagttattgaatgactgcaaaatgtagttctgtgaacttattttgtactagtcaattcaatcctggacactgaatatgtagctctaaaattctaccccttgagtatatcttttagattatgtaactcagaaatactgaaactatgtcctgtcactttaccttaattgaaatcaagatatccaaatattactaatgattatttgttccaatgctcactggtgatgctgagcttgttcctgtttcacgggcttagcctctgacctgtctgaagtttgtagatgaacttcactacactgtttttattttaacatttctattaaataagacttatcattttatatgcattatttgtccctctgcatgtcaattttgttgactctaaacctacaaacataacagttcccataataaaagtgaaggagaaaagtcttcattcatgaggcattgtgaaagtggaatgttttagagatgtggaagcctggcagcataattctcagacaggaaggcaatgtatataaaggccaaattccccttctccagtatgggagtgtgctgcctgtgaacatccaaatatggaggaaagaacgttttcacaatgagctttcagcttccaccagcttcatgtggcaccaagatgttaaaatacatcacagtatattcaggaaattgtttagccataccctaccactgccccatccatgatactagaccaatgaagtggcttggcaaatattggcaatgacaggcctagaaaacagagccagaagttgggccttagagagttggtggtgtggcaaggcagttaggcattccaacaaatctaaatggaaggtttgggttggcctcagaatcagggtagagagacgtgagggcaagcagaaatcaggcaagcagaggagaactaggaagatccacgttccaaagggaaaagcagcaagtaaatgggacatttacaaaatctgacttggtagtgagaagaagagaagctcaaaaattataacagcaaaataacctaaattgtgaatgatcgggatactcacatcaaggaaacgttaatcctgttttaatgttttaatgaatcatttattcagattatcatttattgaactgtagctcaagaggtttagataatgatgtcacaacttctaacttgttttgaaaagccacattagttacagatagagtccatctaaggggggataaaaggaaaggggcagagagatgagtaaatactggaatgaagtaatttaaaaatgttaagatcccagcctcaataatgttcatctttccttagctctgaacctatttcaagtcatttgttcatgctgaattgcattttcttctcatgtccttacgagagtcacttgtcagatccctgaagtaatgagacctttatgactagtgttgttactgtcatagatacattttaaaatatctattaagaaataaaatgtacttaacatattatgtcttcctcagtaagtattccattctcatttttacacatatcattgagttcaaaatgtaattctttacatcaggcataaatcttatttcctttcatgaagttaaaaaagaaaactaaacttcccagatagtctgtaatgttttcctgtgtaattaacacctcattcacagttgtgtgtgccagtcaaggccctgtctcctctttcctaacatttccttaataccttgttcaggctgagctgatgcctaacagtgtgcaaaatacacatatggaaacaggggaatgttagagagaagtcagctgaattaccgtgacctgccagtttaaagagagtacttagacacaggtttcattttgtgggtttggggtctgtgtgccatcccttaagtccaattactgctgtaacctcatcttcttcatcatcatcctcatcaacaataaaaaccatctgtcaaatgaataccaatagtccattatttgcattcttctcttcttaatgcttctaagagggccaaatgtttataaatcaagtgtctaatttaagatacacgttctctgacactgcaagtcatcctggaagcattaggttatttttactgttgaaaatttgtagatgtcattgatttaaatagccttgtatctttttttcttgctgttaatagtgaccctctgtgtccttgtgcacagaaaatgcaagtggaatcaagctttagatcattcaaataaaatcattccattgtgggaatctcctggcttcatttttaaaagttatattgaaatttaacatacattaagaaaaatgtgaatgtcataagggtacagcttgatgcttttttataaaatggacatacttatgcaaccaccacatagtccaagcaacagaacatcatcaccccaagaaactcctctcatgctttctttcagtcactttccactctcacatgggtaacccgttataacttctaataggatagattaggtttgcccattttgttctttgtatgatttgatcaacattatgtttatgagaaacatttatattgttgcatgtagttcaatttcattcattttcattgctatcaaatatatacttttccattgtatgaataaaccacattttttttatttctacctctaatgggtatcttgattgttattttagattttttaaaaaactcatatccacagttaaaaggtgattacacttttctaaaggatgcacactacatattttggaggttttcctagagacattatctaacatttttatataaaaatggagaattggagagagggtagtagaagggcaatgaggaaaggaactaatatttattagaactaccatgtactggacattttggtaaaaatagttgttttcttttgaattgtggtaaaaaatatataacataaaatgtaccatccttaccacttttaagtatacacttcagtagtgtcaagtatattcacattgttgtgaaacagatctccagaacattttcatcgtgcaaaactgaaactctataaacattaaacaactccttttttttcctcttccttttcttcagtcactggtaacccccattctattttctgtcctatgaatttggcttctttagatacttcatataaatggaatcatagagtatttggttttctgtgactggtttatttcacttagtataatgtcctcaaggttcctccatgttgttgcatgtgacaggattttcttcccttttaaggctgaaaatattccattgtatgtttgtacaacattttatttatccattcatccattggttgacatttgggttagttccacctcttgtctattgagaataatactgctatgaacatgggtatgcaaatatcttttcttaaaactgtttccaattgttggagtatataaccagaaatgggattgctagatcatacggtaactctatttttttttttttttgagagagggtctcactctgtcacccaggcatgagtgcagtggtgccttctcagcttactgcgccctccacctcctgggctggagtgatcctcccacctcagcctcctcagtagttgggactacaggcatatgccatatgccaccatgcccagctaatttttgtatttttttttttttagaaacggggttttgccatggtgcccaggctggtctcaaacttctggcctcaggcaatccaccctcctcggcctcccaaagtgctaggattacaattttacaatcccatcaaccttgcacaagtgttccaatttctccatgtcctcaccaacacttgttttcagatttgttgatagtagccatcctactgggtgtatgcagtaggaattttaccagtgatctttttattcctttaacaaagttgttgcaaagtataagtaccattttacatcaatgaaatcttagcacaaaaggattctataagagaaaaaatggggcacagggattttccagtccaggtgctcttgaacttgacaatgagcattttattctcaaagttccacataatcacaaaacaaattgaattcttttgttctgagctgcaagatataaggtgctctacaggattgcctgactttaaatatgaaataacagctttagttttagagtagtggttctcataacatggtccccagaccagcagcatcagcattactgcaaacttggtagaaatgcagattctcagatctcaccccagacctactgaatccagaactctgaacagccaagcaggtggcacacacctgtaatcccagctactcagaagaggggctagctctattaccgtgacctgacagtttagagaaagtacttaaatacatgtttcatttgtgggtttggggtctgcatatcatcctttaagtccaattactgctctaacttcatcatcatcatcctcatcaacaacaaaaaccatctgtcaaataagtaccaatagtctattatttgtattcttccctttttagtactcctaagagggccaggtgtttataaatcaaaagtctaatttaagataaatgttctctcacactgcaagtcatcctggaagcatcaagttaaaaaaaagagctttttaaagctattttttattgagacaggatccatgctggtcttgaactcctgggctcaaatgatcctcctgaggtttcctatgactgatttattttacttagtataatgtccttgaggttcatccatgctgttgcatgggccaggattgtcttcctttttaaggctgaaaatattccactgtatgtttgtaccacattttgtttatccattcatccattcatggacatttgggttacttccacttcttgatcctgaggaggattgtttgagaccagcatggatcctgtctcaaaaaaaaaaaaattctgcgagtgaggctcagcaatctattttaaaacagccctccaggtgacactcatgcatgctcaggtttgagccctcctgggtttagatcattaggcagatatctaaattattgtctaataatctccacactgttgccaaacagaaaactgacatattgagcactttcaggtttccagggcaacttaatagagtaaatctgtgttttgctctttataccacagttttcaggaaaatgttggattagcccagttataataatgctggaacactagatctctatccatctgaaagttcacccaaacactaatttatcagagttgcttctgaacaaatggccacctgagaatagccaccctaaccaggaagacttattccggctcagcagatatctgacttatctccaggattttcactccacccacacccaagtccccaccttttgtctcacttttgggtctagagagagccttgtaatgaatggaccaaaacagccagagatagaagtgaaagcaaacatgcaaacattcctcccattggcatcaggagccttcttcctgtacctactaccaaccgccgcaggccctggccccagctatcctcaaccacttccccagagccctgcaaagaaaataacaaagattcacagattagactttcctctgaaaagtgggggaatctgattttagtcctaggaagggagttgtggtttatgccttttttcttggcctaattattaataaaatactcccccaaagtatcctagcttaaggagtaaaattcaccctaccaaaaatctacagttagctccttttttaaaaaacagaacatttattgtgtgactaatcattgaaattcttaagataaactggatgctacaacagctgccctcttgggtttagatgttgttccttctcagaatccacgcctgaatctgcggtatacaatattcaggtgcctcattcgaccagtcctggtattatttcatctttaagccttggcacttcagttatacttcctcttgcacttagcagggtagccacatttgccacaggatgacttctgaaggtggcaggccttagagccacagtggtggcacaatgtgtgcgtcttactgcaacacttttcaaacgatggcgttcccttcagtatcttgcttctgtggccaagaccaaagagtgttgttagctcttaggtaggcttttgcctttccctaatgcttttaagtagaagatagatgatccttcagaggaacaggagacagtgcggctgtattcggtgcagcttggggccttgaaggagggaaacaagacaagggagttaattcctaggggtccttggagagaagaacaatgatgtctgggagtaggcatggactattgtgttgatagaaattgcagcccctaagaaaggtgccatggctcacacctgtaatcccaacactttgggaggaggccagagccggagaatcacttcagtccaggagttcgagaccagcctgggcaacatagtgagaccctgtctctaaaaaaaaaaaaaaaaaaaaaaaaaaattgagaaaaaaagagattgtgccctgcctggacccatagctctgttatgctctaaagcttccacccacatttctcatccatccacccctctcctctatcctccacaagtcactgatacttgagacttaagtctcaagagtttttcctaaggtgaatcttgtttctagtacagattgagcatccctaatctgaaaattcgaaatctgaaatgctccaaaatccaaaactttttgagcaacaacatggcaccacaagtggaaaattctacacctgacctcacatgacaggttgcagccaaaacacagtcacaattttgttttatgcacaaaattatttaaaatagtgcataaaattactttcagactatgtggataaggtatatatgaaacataaatgaattttatgtttagacttggggcccatccccaagatatatcattatgtatatgcaaatattccaaaacaaaaaaaaaattacaaaacacttctggttccaagcactttgggacagatgataatcaacctgtatgtatttggtggtaagcctaacaaaaaggtaactgcactgctttgtatagcacatctttaaaaattgttcaaatctgatttaaggtgctaatagaaattcaagcctagaaactacatttaatgtgaaaatatgtgctggccaaagttgtgtgcacacaatatgttccaattacttagcaacccccaaaaatattttacctgcatgtccactcggcaaaatcagccttctctctgccctcttccagcatgcacactgacactctgacactctgacaatggcaaggctggctgaaatcagcagtgaagtgcaggaatctggatgcttgccctcaccatatcctgaatcttggatgctttttactcctcatcttaacacatgccaatgttatgttacaatatctgacatttggtttgtttcaacattaactctgcgataaaagttaatcaacagtcagcttcattttccccgcttcctgcccaaatcaatatacatgactcctttgaagaaaggggaatgtaaactaaagttgatcctatggttttaacttacctcaacctaatgtatgcttaaggaaagaaccaatcacttacctagataccattgatttagtttctttgtgttgttgtgaattaataaattacagtgtttccactttctaagtaaactttttatcattgattagtcctcagaggcgaatttacttatatttactaaaagaccaaatatactgattttcagaaaatgtaaactgcaagactagaacatggtgtacatgtgtataacttgttttaagtatagagaatattaaattatatgttcatttcaatcttacaatcctccaaaagaactgcatggtttagatctataaaatgaaagataagagaaaacactactattaataattatatttgtgtttttaattttttttttttttttttttgagacagagtctctgtctcccaggctggagtgcaattctcccgtgttcaagcaattctgcctccagagtggctgggattacaggcacataccaccatgcctggctaattttttttgtatttttagtagaaatgaggtttctccatgttggcctgacctcaggtgatccgcctgcctcggcctcccaaagtgctgggattacagttgtgagccaccatgcctagcctatgtttttaatttttaaaaaattttaaatctgttctgtagatgttaactagggctatttatagaaaaggctgctgttttcatataaagtctttgatggtatcacctaatttcccttcaggaacaatggacacatttctcatccaatcccagcattgtatttgcttgtttatctctgaaaacttactctactgtttcaactggcatttagacctcctaccccacttcaagactagatgaaaatcagaggaatcaggcaactttgcctgacattttcagagcaagaaaattggtgaataaaatgggcctttctgtgcctacacttataattctcccccaaaaaagcattgaaaagatcaacctaatatctttactttataagtatcaataaggcttaatatgtacagacagtttaccaatgtgataatcaaatagaattgttagtaacaatgaaatagagtgaccatatttagaaaacatatgctcataaatgcttctcattcaaaatgtatgctttcaatacctaagctcacttccctcttttaaaaatttaaaaaataaaaaatgtttaagaaaataattttataataaataatgaaatgctttttaaatgttattagattcacgggtacttagagaggttagcacaacatcttgcgattggaatttagctagttgtgaacttgggagagttaatatttggttgtaatcatgaagattaacatgcaagaattatacattttacttcacttataaaaacagcttaaccatctaaagggaagaaaagagctaatgtgcttcattcagtatatgtaattacaatagggcttagggcagtgctttccaaattttagtgagcataaaaattatctgaagtagttttaaaaatgcagattcgtggctccgacccccgggattctaaaccgtgaattctaggatgaagtccaggaatatgcatgtttaacacccaaactcaccctcaaataactcatacaaaattagaattcagacccctcttggacaacaccaacataagatgacagatgtacttgttattgcatccgaaaccacagaatcatcagataaaatacccatcttagaccatctttcatatactttatattactttgctaaagaaccaaggtagatagcatttaaagggctgctgataaaagttaaggtttattcatttcaggtactatacttctcattatggtccttaaaaattggcccacagcttttaaaattgatatttaaaagtcatgtggaattggaattgtttcttaactttctgttcatttttactgtcttcaatattcccatttaatattgtttgatattaaaatataatggagtcacagtatttatcatctattcttctttggtttcaagggaagacgagggaaaacaggacctcccggaaaaccaggacccccaggaccacctgtgagtaaacaatacaatgactgtccctttaaagagtctgtctttatgtctgtgtgtttacctaaggattattttactcccctgtagataatgatttcctttattctactgtttagaatgactggtttcagcatttggatgagtagttcatactctctatattcctaactccatcatcaccacaaaccaagagatgagggaggctggtaattgtccatacacctcacccacttctttattacacaaatggcaataacagtagtgtctgcttgaacatcccaagccaagtgtccagatagatgaatcctgttctgaacctacctgaacaccatcttctagatttcttaacatccaggctgttagaaaatcagacatctggggaagcatatccacttttcttgatatgaaactattttgttagtataatttcatgatttggtaaaaagtgctataaagatcatctaaccagttagcttatctggatcctttaccccaagcttctagaaaaaaaaaatattcaatttcttgtagttctggtaactctgcagcctatgagagtctggtttgtgtccaagctgctccactgacactgcactctctgtggtcaccaacaatctctgcattgcagattccctgagcacttttcaggcttcttcttactttactgctacacagaaatgtatactattgactgctctctccttgaaactccctattctgttggtttagcaacattgggtttttttctcctatgcctggggccatctttttgtctccattaacagcttttcttctaccccctacatgttggatggattaatgaatgccagttttttatttcaacccagacattgttgctgagtcccaggctggtacattcctttattttttagtatctccacttggaagtctcctagctaccacaaaagtataatgtccaaaactaatctctaaaaataatcctagatttttttgttcttcatcctcttcatctaaacagtctctaaatcatatcagttctacatcccagtagcccacaaatcctctccgtcttcactgtcaacggccttagtttagacctctgtcaatttgaacctatatttttgaagtcatctgagagctggtctcattgcctctaccttctccaagtggagcaaaacctctaaatcatgacagcatctaggtgggcttggatggcttaaaattctctaaaagcttaaaactatttgattttaaattcctcaatcgcttcttttttcttcaagaaagatggattccacatcctctacatgccattctgggcccttcatggtttgccttttacctgccttggcctatcctcctctatgcccttccttcttttgtaatcagtaatcttcgcttactatttcaaaaatgccatcacttgcaaatgttctccagtaggcctatatatgcttctctctatcttcatgactcagctcaaacatttctcctatagaagctttgccagtgctctcagcatttgaggtttcctcccatggtcctgtatcttacacctcggacagacacggcatgttactttggactcttattttcctcatctgtctgaccactgcactgtgacttttttgaacctctattttctcaccattgcttagaacagtctctagcctatagcatgtgattattgtttatttaatgactgagtaacaaatgaatatattttgtagacgaaaaaattaaaaccaggtaagtgacctaaagaccaaaaacaccctgcaccaccactagagggcctcaacccagtaccctaggaatctcttaggatgtgctcacctgccaaaaatgaacatgattgctgtcctgtcattgatttcatttcactttagccattctagtggattgtcctattaacaatgcattggtgccaattgatatttgttatataaaagcacattgggggaatgagggggtgaggaagcatgagctgggtgtctgcattagtccattctcatactgctatgaagaactacctgagactgggtaacttataaagaaaagaggcttaattgactcacagttccacaggttgttcaggaggcatgactgggaaggtctcaggaaacttacagtcatggcagaagggagaaggggaagcaagcacatcttcacatggcagcaggaaagagcgagtgtgaagcgggaagtgcacttttaagcaacctaatctcgtgagaactcactcacaagacagcactagggggatagtgctaaaccattagaaaccaccctcttgacccaatcacctcccaccaggttcctcccccagcactgaagactacaatttaacatgagatttggttggggacgcagagccaaaccatatcagtatgctagaatctagtcttttaaaggcatcagttttgttgatttttatttcaaagttttaggcaaaacagagaacacattgtaagatctttaaaataattgtttcatgctttaaagaagaaaagctggtgaatgctaacaggcaagattagaccttcgtgtagttttctaaacctatgatgctgcttttaagacaggctaattgttgtctcaaaggaggaatttgaatgttgaaggcctttatgacaagcttgccaaatgtgtaggagagaagaggattacaccgaattctggaatgagttctcaactatagatcaaatgagtttactgaagaattcagaagattaaaaaacatgtgactgtatgataggatttataatattcaattccgcagactttagtttgttgccagagtgtttgggggagagaggtgcttatttttatttcaaatatagatttagaacttaaactcagctatgggtctgacacacagtgttcattaaatcctgggaacataatatttgaaaaaaatggtttattaactttttaaatataataaaatacccaatttgttagaaaaattaggaaaaaatctatgcagaagacaaagtgtttactttggtggcatgatctcggctcactgcaccctctgcctcccagattcaagcaattctccagcctcagcctcccgagtagctgggactacagctgcgcaccaccacgcccagccaatttttgtatttttagtagagacagggttttaccatgttggccaggatggtctcgatctcttgacctcgtgatccactcgcctcagcctcccaaagtgctgggattacaggtgtgagccaccgtgcctggccagtattcactatttttaaagtatcagcagagcacttgttatctcttaggatttcccagggagctatttgtattttattacaatttacaaatagcttaagagatgttcccccttaattgtggacatttttagatcaaaacattattgtttttcatttatatttcttttccaacattgaaccctttatgacatgcatcttactttatagcaagaaggaagtcaagaagagaacaagagacgggttggtaggatctacagtttttctaattgttactggagttagtatatacctcgccccagtggccagtatgtgagaatcctgaagcatgtgttagaatatcttatgaaaatgtgaaatgtattttttaaaaaattttaattttgtctcttgtcaaacagtaattaaatactatgtaatatccctcaaataagtgaatattttatatcatttaaacattatgtttgagcaattagtctttaggaaagttggagggagactttattctagtcagcatgattgtctgcaaagaacaaaggaataggaattaccaggaggcatgatttttttatttttttaataacagcatactttataagaaaatgttcttccctttgggggtttaagatgtttctgaaatcaaacatagtgttgttattcgggggagtgtcagtgaagactttaaaaatcttgaattgaagggactctaagtccccaatggcctgaagcaattcaaataaagtgttttaaccagtccttctacttgattatttgttctgaagccaaattagtatattctcagtttcttacaaaatgtttgtaccaaaaggacaacttgtttaccaaaataatttctgacaaatagctaagtgtgtgcgtgtgtgtgtgtgtgtgtgtgtgtgtgtgtgtaagaggacaacgttttgtcccctgagacattatatctcctagggaaaaaagatttctaataatggaaaatttactaacactagttttattaaactaacattattaaattatctttgtgaatcagtgtttcatggaaagtcatgtatatcactccaatttagcttaactattattcaatagcaactttttgtgtctttaggacttatttgaaatttatacacatgcaatatgcatataatgaaactattcttaatcagagtgcttgtcattgaacagtgactaacctggttaacagagctagctacaatgtatttttgtaaagtatttgtccaattccttgttaaaaaccagagctgatcttacctatacaaaggaaaaagctcccaaagtgtcccatgtaacttctgctatcttgtcctaagcgaatattcttcattggagggaaactattacatagagatctcttggatttatttcaatacataaagattacgactgagaacagtttttcagtatgagagggctaagcatctccctcgggaaggaaatagcactaactcctgaggaaacaggttcagaggaaagagggatgaagcagaccaggagaatgtattaccatcacgagctctgcattaagtactgtatttccagtgtcttagggaatccttacaactatcttgaaaagtagaaattatcttcattttataatggggtaaatgatacttggaaatgtcaagtaacttacccaagatgacacaagcagtgaagacagaactgaaacacaggaactgatccctaaacctttattctgccagacttcaggtgtgaaagacaagcttctagtttacagttcaactaagattattcttcctcaaacatcatacctagaacaatgtttgagttttccgttgcaatcaatggcactatcctgactccagacagcgagatggtataggatagcataggatggcggtgaggaacttagtccttctcctcactagcttgtcctggaacaattttcttaatgtttccttgtctccattttcttttctgtaaatttgaaataatagcacctaccccacctactttttcccacagtggctacaagagcccaatgtcattgatatgaaagaactttcttctaaatgtaaagctctatctaaatgtatcttagttccactgttattattctgaacacccattcacactgtagagagaagagattgtcttcaatcagtaattaaaccaacacttcttttctctctttacagttctccaaaaatctagttaacagaaatttgaatgtctatcaatgaattgctgaaataaaagatcactttgcatatgtcacacttattctagatacgtcatgaagagatccaaaagttattcccaattaggtaacaataacaaccaggtctaaagagtcagtgatgttttttctcccgagatttacagcctcttccttgcttgtggggcttgttcctttaccatctgagctgttgcattttattagttgtgatgttctctaagtctcaactgtccttcctcacactccaataaaagcttgtcttttttaaaaaccttccagttatctgagtagcataagcagtggaaagtaatagacttatgttatgataatgagacttggaaagtctcaagacttggaatgcctttgtttatttcaaagtattctggttttcagttcctttagaaaagagaggaaagcagctggaaatgaggcggagcaggagagaaagtaggagaatttaactaatgagccattaaaggaagtaggtattagcccatccatttgacattaactttacttctcattcatcattactggaaaaagcgtttattaaaaaccacactaatttaaaattgtgttattatttcttctgctacaggcaagactttttattttctttctttttttcttctggtattgtttttatgcattgtttcattattgcagtatgagaattgagcagtgggctccatttgtcacatttgtgtgcatagcaatttcagttgaaaacagaaattcaaaaaattttgtaacatggggcaacagctccatctactgtttccataggaaaagctctagtcaaagaatgacaatagctctttgaaggatgtcagaggaatggaaatttttcgatgtttgaagcttataaatccatatgatttttaaaaaattattttcaggattttgttacatttatgcttaccttgaaatttaaatataagtgctatttcatcagcagtcattttcaatgtcaacttgatgctcttttgaggtaaaaatccatacctacttcatggatctctaaaatgcccttctattgtacaataccaataaaactctgcagcattaatttttgggagcttactccaacaaaacatatgcttcttttctaaaacaagtctgatttgaaacatgtacattcatgtttctattttaattttaacttcagtgtagaacttcttctacctttaaagcatgaatcattgcacagtcctgaaagttacaattatacatcagtttgcacaattaaaagagtaaatttagggtgtaaaatttaatttatttactaaacaaatacttatggcctatctactatgtgttaatcactattacaaacattgaatatacagtggttaaaaacacaaagcaacaacaaactacagataaggtctctacctttctttataacttactgtctgtggtgaggcagtacaccaatggttaataagcagttaaataaatagacaaaacaatttcggtttagagtgaggtgctatggggggaataaactgggtaatgtgataatgatttggaaggaggagatgttcttctcattaccatctaattgaggtggtccagggaggtgtctctgagcagaagacattccttgagaaggagctggccatgtaagggccagagcaagaactttccaaacagaaatatcaggacttgcaaagagcttcaggtggggaaaagcttgatgtattcaataaacataaaggagctaagaaaagaatagtgccagaaaagatttgggagctgaatggcttcatcatatagggccttataagaatggaaaagaagggttggggggcaagtggagagatacacgtagccatgaaataaccagttacatctccgttttgtaagtgtgtgtgtgtgtgtgtgtgtgtgtgtgtgtgtgtgtgtgtatctgcagcggtttgatttttttatgtgatgaaattactgttcctactgattcaaataaattattctgaaggtaatattgtttttagcccattatctttagtctttgagtggacggggaataggcttgtttgctgaaagaaaacaaaattgacaaaggtttgattgtagcccatttaatttcagtcttgtctgaatccactggatatcactttggtcattagagatggagaatttcatcacatctaagtcttttctttttccccacagctaaatctgatgtttcctttctgataggctataggttgagtcagttgaacagttggggcaatgaaaatacataccctcaaaacgccatagaactaagtgccttccggcacttgtgcccccttatccatcgctgttctcaacttgagtatcttccgtctccaactttatttactatgcactgaaaactgaaaggaaagttattattttcagcatatagcaggacccacctctaaaacaatttagtgtcccaaaacacatttttggactgctgaataaagcagatgacaaaaactgtctcagtgaaacatttgatcacttgttaaaataccctcagaataccttgaatgtgactacatgcattttgaagctcatcatgtatcaatgggaatccaattcaaattcttaacatcccttctagaagcttgaactgatcagggcttagtcatgttgctcagttttcctttcagcaagagaaccacaatctcttctgttaaatgactaaagtctgtgcaatgtaatatcttcagagaaaatgaacctaacaatttatttgagtcaatgggaataggaatttcatttcttaaaaaaaagtaagatgacactttctcagatttaaaaatatagacacataagacctataaaatggagacatggctagttaatcatgtttattgccacttgtccctcatgggggtaatggtcccagacaaaacagctgttcccaacattgctaaaattccagtgtcaccttgtgtgaccacagaatacatagacatgcatgtgaggcagctggggatatcaggttgagattttgaaaactggctctcaggttttattttctaattatttctctttttctctccctacggacagcagcagtaggacattattagtcactttctgacttcctgtgttttttactaatagtggtaacattatggtggaaaaaatattatatttgtacagccactgactgcttgtttcatcttgtattatgttcttgaaaccaactattaagacatctggactgacatgtgttatttacagcaacgatgagacagactatttgaaatccttgatctgtggtcaccaaacttgtaattagttgtgatggtgcctggattcaacatcatttctttgtgttgggtaaacattaagatttgagaagtcaaaggccagtcagatttattagaaccttaattttcagaacgggatatttgtttcctaaataatcttatagtttgcatttgatgatatagtttccaagaggatctccatactgtatgtaattttactgctgtatatctttgtgaggtaggcaagaaaagattattttcatttaataagaatattctaggtcctgatgaataaggagctcagctcaatttttgcagtcagttttctctgcacatcagtaactatagcttagtatgatcaaagtaaagactgaaggaaattatataactagagaagcaacaagttttcagcattgtctaggggacctaaaacatggaagaaaagttggcagaaaataagatttgaagggtcttcagctatgtctgtaatgaattcattaaaaagtagaaagacccaaagcaaatatcgcaaaattgttaatatttgacaacataggattttggactcattgcaatttatattattttctgtacttttcagcatgcttagaatagttcaaattcattttaagaagcaggaaaaacattctatgggattagtaacagttaatatcactgattacttcttcactggctgatatcatcagtatcttctcctttgactgaaatcctttgtggaatggggccacgtgttttaaaactaaaattattaactattttttagaactttcctgagcacactgtctataaccatggtgttcagctgagccaagaattgtcatttgtagatttatcattagcacaacctatagataagggagagaccttaacatcacacatttgagttgaaagtgaggaccacaatcacccaattattccagagctgcccagaatgtccccagctattcaaattgtgcacatgctcttggcctctatgtaacttggcagtgtataagctagtgccaccagcctggttatcttaagtcccagcagtgtgccttgaaacttgcattttcttaactcaggaagagttgtcattctaccaacacttttaaagagaatgaatgttatcacctaattacagtaaatggaaactcaaagcattcataggtgtgggctgcctgtggggtccatgtaagccatctttcctccagattttggtggcatattgaaaaattcctgaggtcaaacaaggggatggaggcacagttgttcctaaggtatggtttttgttggtggtgatcttttgaggacaccactggatacaaataatttgtttcacacattcccctccttgctagttttcatgcccctgtggcttttatcaccttgtactgggtcattgatgttgcatctgtgggtggcaaggcactctaaagattcctgctgctccttatattgcaggacactgacaaataatatttttcctttttcaggacatactggggagagatgagtatgaaacattttatggatggataagcagaatagcagcattaggggaggaatctttttttttctaactatcatgccatggagatcagtcaaaatgtcccactctatcaataaggcagtgggctttacaccaattaggttgatatctggggaaataagtacctttaaatatatttttttctgccttagaaaacaaagtgttaaaaaatctacaagcttcctagcataatttagaaaatctgcttttatgaaatgggttaattatgcccattgaatgcattcactgtcacagtctcatcctcccacttctgttccaaaatgacaagtgaaaccagggactgtgcaattttggaagacaatcagatcacatattgagtattttgcttattcatacaaccataaacggcctatgcttgagttccctcaattacacagctcagtatgcaggccagaagcagacaagcccagctcaagtgaacactttcctggaatacacgggggaacgagtttgaaaaatgtccaaagtggcagatgtgaaaaattctcattcaacatccagagctgcctttgctgcaatccttcacctgttaatcgcactgcctctgaacttgtgaaccagggatgctagcgatatcttagactgagacacttaggagctatagatctttcaaggtatggtgccagtatatgccaaggtgggggaaaagctagcgagacaagacaagatcatggatcacagcactgctcagaattttcagacattcaccaagaataagcatgtcgctgccagcttccaactaaactgttattatcttttgtaggggaaattcccaaaagatgtccttgataaatgcttaaaccattgtactgtatcacttaaattcttcagactcctgcaatgctaatacacaatctctcctccacaacagaatacaatggcactattgtagtcttaagtgaaggatatttcattttccctgagtgagacaactttcccacaactgttatccactgcaatttcatgctccttggagtttctgtgcaccaaaatcatccccaagcaatatactctcttgattagctagtattttattccacctcctttgactatatttattttttcttttcttccaccatcttataagcgcgaaggctccttgcccttcatttggcattattgaaacctcaaaagttatttaagatgctggttgagattgttaacttccttccttttccatctcagcctaactctgatctttctttctcctgctctctttctagtagaagccctccatgattttgaacttccttgtgtctctgtgttgttcctctctcttatccttacccctctcccattctggtcactttcctcttgactcttcttgtcatccaagtctttctttttttttttttttttttttttttggagatggagtcttgctctgtcactcaggctggagtgtagtggcgtgatctcagctaactgcaacctctgccttctgggttcaagcaattctcctgcctcagcttcccaagtagctgggactacaggtgcacgctaacatgccctgctaattttttgtattttagtagagacagagtttcaccatgttgcccaagctggtctcgaactcctgagctcaagcaatctgcccgtcttggcctcccaaagtgctagcattgtgggtgttagccactgtgcccagccctttcaaaaggcatgtctacaccaagtctcagaccattcttttcttggcccttagtgattgtatacctcattaatcctgtgatctttcaccacacgatgccctgctcgattgtttaaaaaccagctttaagatgattggtattttattttcccatcatccttctcactgtgaggtggtttaggggaaagagttaaaagatcaaggcagtggggtcagacagacctgagttgaaacctagctcttgtctactatttatatgaccttgagtcagatatttagtcttttgttatgtgtaaaataaggaaacaccacctcactgggctgctgtaagagctaaatgcaataatgcatgtacctcacacagttgtcactttcaaagggtaactattgttatttattaatatttttgttatcattatcctcatttaatcattatttgccatcttctcattatttttgtctttctttcccaggatttaggaactgacatttccaaagcaaaagggttgatattttttctcttttattatcacctgcatgtaaatttttcttctatctgcttggctcccctccttcctattttcctctgttaaagtctttatagagaaacttcatccatctaagaatgttggcctaaatatatgcatatacatattcatcatctggaaaaactcattagattctattttcaatgtgaacaaacacacttgaaaacatctcttttaaattgagagcatttaagtttcataactgtattcttttgtattgaccaatgaatgaaacaggtccatcagattagcactgaaacatgaattttccctgagcttatttccatttgagtccccaccacttacaatccaagttaacctgaagacttggctcacaagtcatttctcaaagcctctttccagaaagtgaaagccctcagcctaacggtggtggaggcagagatgcagtctgcagagtcctcagcctccctttcctacttggtactgtcttctcctgtccttagcccccaagggccatccctttattcttctcctttcctgtcctacccgccttgctcttgggaaatatgtaatgaacaattcacatgaatctattagaatggaatgattttggacttggttctaccattcatgtggtttggggaaaaatctcttggttttcccatctgttaaatggaaaatataatactacccacttcagttggttattataagaatcaaataagataatgcattttacagtcacattaccctaccacccaagaaaatataagtgaaaatacttttagaattatccagagctgtgaaaacatgaacctttagtattatatctcccaggaacatttgcatttgatctggcagtaaaacctaacatcaaaaaaaataagacttttgttaggacattttgggcataacctggagagcaggcaagatatttgaaggaaaaagacctcctcccaggaacctttaaatttcacctatatgtggcccatgttctctagggtgacccatttaatcccaagtatgagagcttgaggtctctatattgaaatgtaagaataatataaatactcactgaatctgctcttggctttaggaatcacattttatagttcaagagtttctagcagttgttgttttttttgttttgttttttggtgttttgtttttttttttttttttggtggggagaaggtgttggtatccctttagtcactaaaaattctcaacagaagcattctcagaaaaaaaatccattacaattataactgcttaatttatgtaattaaaccccaagagacactgaaaaaaatttcattttgagtaaatattaagacagagaaaaggatgtgtgtcttttttaaaaaaagaaattgagtcccccaatattttctatctaaagaacattattgattttttcccccagaattactttacaacttatatgttgtaattctggtccaaaaatccatccatgagctcttttctacttaactggagctcactataactatgctttcaattaactagccacattcttaggttaatctaaatctgttggtcttgtcttttataaatttggaagaagcaagccctttgctctgtttgataccatttctaactaaaaccaaaaccaacaaacaaaaaaatggctttctccacagactttttcttataaaagcaatgattctaccgaattcaacaaacattgggtgctggtgatgggagacagatactgcagactgtagtgtgctgagtttaaaaggatcaaaactccttgccctcacaaagtttttgttgcaactgggaatacaaacatgtacataagccactatactcaatgtaaatgtgctttactaagttatgtataatgtgttatagatggaaacataaatgagagaaaaactcatttgacattaccttttccaaccattattattttttcatctcaccattcctatgtctgaatttaggcttcctaatgactgtttttttttcttgaatacaaagggaaaaataattactgatctctacttttttacaagccattagaacactggaaatgtttcttgaaaattagtccaaaggactttccaacaagcattctatctgttcttacagaaaagcgattttttagcacttttgaagagagttggttagtacaacttccttcacagaggtttttggtatttcaaagattgttcttgaatttaactgaaaacccacagggccaaaagcagctgtgtgtaacctgaaaacatgtaattttgaatccagaaaaaagcttccaataggagattgaagagctatggtgcataagtggcatctggatggctcaaggagactcagtcaacagagatgaagaggtacagggtacttttagagaaaagggagaaaggaaaatagttcaagattgaggatcagagagtgagcaggcgatttgactaaggagccacagagctcctgattcacaatgtgcagagtgtgctaaagctggatcagaaggctcaagctctgacttgcacagacagcttatggcaaagaacagtcagggaaaaaaaggcaaaaatattgctctttaggctaagtataccgggtgaattggctaaaaagtgaaaatgcagctaagactaggactaaggactatggtttttaacagagaactcttcccaacttttaaactttgggaatgtgcagccaaaactgaaatctactaagggaatgataatgcaaatagctcatcatttttacactacgtgtctgacaagtccggtggcagacatcatggtatttctgttttccacctccagcaagatttaagccaaaaactatttaaaagctgctagaactattgctgagagtatatacttcccaaattgaatatagctttaattcactttatcacacctgctgtagttctttgcagtaagaaacgacatcaggatctctatccacaccaggtttataggcctctcagataattatgaatcagtacagttaggttcagaacagttgtttctccctggagttcattagcatattttagctgctctgtaattgtatactcaccacattaatccagatgtcctatatctcccaatcccatacaaatagagtgaagcaaatctccgtaaaaaacagacattgtataggcatgacttgtgtacaatcatgttgtgggtcactgttataagcaagatattgggacatttttcctttccataaacctttaaccacttttcctagcagagctcctaagagcataagccaaggctgacatgccctctgcagttggcctctcttcaccactggacctgggtcatctaagtgtcttttgatgggtccttgtaaatgcaaacctcagagaaagggttctgtcaactgccctagagcatctacaccaccatgtgatgccgagagatctgtcacttaccacaagtctttaacttctttcttggagttgattggtagtctgcaggatagacaactcttgctaaacttggcgacaactccttggatcttctccagccatatttcataccagaatagaagatagaaaaatagcacatctcttgggatgtggctggtaggatagccaccaattctgaaaccccaaggttgtgttccaactgtaaacagagttgcttttgcaatttaaatgcttatagcttattaatgaccactatctttgacagtgttagagcaaccaagtgagacactgcctcactgactatagtcagagtagagggggacttccagaagactctaattggcatctctttctagtctctgaagggttccttcggaccgctaggagagtttgtataaagtattgcctgcagggtagacggttggctgtaaatttctgtcacattaaacttgcaatttgtggtacccaaactatcccagtgactaaaaaagtgagaaagaaaatgtcatcataaatactcatgatgagattaagtggtagaacctaaaacttcagatcaaacccatttcgagtactactttgaagataagacattttgtgacaaaagcagaacatatgaaaatgtagaagtaatttttatgggtttattaatcttgtggatatttgaataataacgttcaaccttttctgtagcctcattgctcttggcattgtttttagtgagttgtgcccttgcctttgtttttagagggagcagctgcactgagccgtgcatattctcccaccccacccccagtggtaagctcagcagcagccagatcaggatcctgcatgagaagtatatactttgcttatgaaatacagctatcttctgtgtgcatatgaccagtctgtaaaggatcatatcccatttcacccaattttttacaaatcattatcattctattgttttttactgttctcacttacactgctacctgttttattctgtgcaaaccctacaacacatttgctttcttgcttcttttccttactgcctcccagaaccctttgggaggcttcacacttcttgtatctcagaccacctgctctcccaacctctacaaacaaagataggatacatttgaatacagtcacagactaggagaaatgttttgtaatattcagggataatctccctaacatgggttaagagactgtatgaacatagatgggagatacaaggagtagataaagaggcctctctcaactacacggtatgactacagctaaaggtaatgtgttcactttcccgcctcctgcaccaagcactgtgaagtacctggcagaagtgctacgtagaagttttgttgattttttttcaatttcagtaaagtaaatagaacatagaagagtgatcacccagtattctctagggtacacacatcatcatgataagaaaattactgcaaaagtgatttttggctgagtttgcctttaagttaagatagtagagtagacgagaactggctttgggcccaatgctaatgttaaatattagccctgccacttaccagtggtgtgaccttggaccagttaaacatttccaaccctcattttctttatctttgaatcagagagaatgatgggacattcctcctgtcattgtaaggactaaattagttaattcctgctgtaatgcctagcacataataagcactatataaatgtttgctattggccgggcccgctggctcacgcctgtaataccagcactttgggaagccaaggcaggtggatcacttgaggtcaggagttcaagaccagcctggccaacatggcgaaaccctacctctactaaaaatacaaaaattagccaggcatggtggcacatgcctgtagtcccagctactcaggagactaaggcacaagaatcccttgaacctgggaggcagaggttgcagtgagctgagatcgtgccactgcactccagcctgggtgacagagtgagactctgtctcaaaaaacaacaacaaaaagagtttgctattattatttgactgattctgctactctatttgggagactgtattattaatttttatgctatatttaagagttctaataattaagaccctctcttttaactagattgaatatgtatgaagttaaatttacctacttcatcactgttctttgatctaatcagccttgtcatcaacacacactcactgaatgcctactatacatatacccctaagccacctcttaatgctactacatatggtgtctaaaattcctccttgcctcattatatgtttgcagaaggatcaacatgtatggaacttcatgtctcctgactttcaagaataagatcttaacttgcatgttcttggctagatactttgtgtaacaacccccccactcaatgattgctttctttctttacttcctctaactgacctagaattctttacacaatgctggctgctgaaaagttgcatgaaaaatatataatgccataagaattctcttcttacaatagctccgttattgtttcagcatggtaacagcatcgtttgtctttccaatcataggcaacaccattacttgtgaggcccattattttctcaagaattataccagcctgcttctaagtatccatcacctcattcttgtgccctttatgtttagtggcacaatgcaaaggttttatattagaagagatcttcagtcacaagctgctcataagaaacacctggtgtaaatgttaaccaacattaatcttttctgtatacctaaggtgttacctgcatcagtgagtgcagctaacgattgcttcttaaaatttttctccacttttcaaagctttcattccctttgaaaaatattaatctttgtataatggtgctgtttgattttggctaatcatcttccttctgtgtcttatcttataaggtaacatgttaagaacttggtctctataatattttctctcctcctagcttttgagttctggatgaaatgtgcaatctcttttctgagatagttgaacctatttgacttgaattacttaatctaaaataatgctaatctttgtgtttttttatggccctcaccccaaaatgtaatccctgaaaaacctggaaaagtcttctttcctttcttcctagaagctttagggacagccaaatgtatttgcttctttcctatccactccaagcccagcatagtgcttactgaattatttccaggtcaactgaaaactatcaatatttaaatttcttaagcctgagattttatagcacacatcttttttctggcccaaaagtccatgtgcatcccattttcttacaactaattcaaaaaagtaaagcaatagaaaaacattttttcccaatttactaagttaataacatgtgggaacacacagttctatagtacattgatcaaaatcctgtgagaagtgccaaaaataaactgaagagttataccctcttctctgggagggtcttatgggtataattcctttcaataaagaatatgctgagggctgaccttctggtaaaatgttacatgctcccacttaggacctctttttggattcatgcaggatttaacctagaaatatcttaggaacctgatgataagttaatgcccgtgtatttctctattaatcagaatatttgactaaatagacaagtcctttttcttcactatatgatttcaagagttcttagatatgttatttaaatattcattgttttggtaaatgtgtatatatttgtctttgatttgtttataatacagggacctcctggaatacaaggaatacaccaaactcttggtggatattataacaaggataacaaggtatggcttcttttttcccataatttataatacatagaaattttatatgattgtatttttgaaaaaaaacttattaattcctaacttctcagacttttatacatgatcacatgtatttaaacatctttccatactgaaagctatgttttcaaaaacaaaaataaaaaaagtattctgttcagtatcttacaaatctagggttttatcctaataagttttttaaaaattttgttcaaagattgttaatgcaaaacattgtgttccaccatcaataatatcatagatctagcctctctgagggcagaaagaaattatttgatactttgaagctctgggtagcacaacaggtgatagacttcttatcaaaaccaataggtgttgcgccaaaatctcaagcaaatatttgcatactacagttcaagaatgagagtccccacctttcatggggaattacattcaatttccccacggttttttttaaatcacatttgggataggcggaatgctgacgtggaagtatccaaatggcaaaagcaagggagttttgttccagattctacaaggagcataatagagtggcagccaagagaagatctaggtgagatcattgattgattcatcattcaatgacaaatatttggggtctgatcactttgtgtgaggcattctgtccactgattaggataccttgtatacataatggttcatcattgatttcttgcaccacagaaagaattggagacacttccctttatgtctttcttttccatgttcttactttcccttcctgtaattttttctgacagctgttactcctctttgtttagaaatcccaaagagaagtgtcaaaaaaatttgttaaatgactagctaattataaaatcccagtttctctctcttcagaacaaggtcaacataaagacttagataatttatggttgacaaatttaaaatcaaatatggaaagttttttatactttataaatttgatagtgatgctattttaaattatctcctttatttaggttttccagggagtattatattaggaagaatgtttgggatatatttcatgtttccttattaaacacttctttaatttctcaacctactcatctgacaaagggctaatatccagaatctacaatgaactcaaacaaatttataagaaaaaaacaaacaaccccatcaaaaagtgggtgaaggacatgaacagacacttctcaaaagaagacatttatgcagccaaaaaacatatgaaaaaatgctcaccatcactggccatcagagaaatgcaaatcaaaaccacagtgagataccatctcacaccagttagaatggcaatcattaaaaagtcaggaaacaacaggtgctagagaggatgtggagaaataggaacacttttacattgttggtgggactgtaaactagttcaaccattgtggaagtcagtgtggcgattcctcagggatctagaactagaaataccatttgatccagccatcccattactgggtatatacccaatggactataaatcatgctgctataaagacacatgcacacgtatgtttattgtggcattattcacaatagcaaagacttggaaccaacccaaatgtccaacaatgatagactggattaagaaaatgtggcacatatacaccatggaatactatgcagccataaaaaatgatgacttcatgtccttgttagggacatggatgaaattggaaatcatcattctcagtaaactatcgcaagaacaaaaaaccaaacaccacatattctcactcataggtgggaattgaacaatgagaacaacacatggacacaggaaggggaatatcacactctggggactgttgtggggtcgggggaggggggagggatagcattgggagatacacctaatgctagatgacgagttagtgggtgcagcacaccagcatggcacgtgtatacatatgtaactaacctgcaattgtgcacatgtaccctaaaacttaaagcataataataataaatttaaaaaaaaaactaaaaaaaaaagtggtttatatacacagtggaatattatttagccataaaaagaatgaaatcctgtcatttgcagcaacatggatggaactggagatcattaaaaaataaaataaaataaataaggaaaaaaaactgtactggctttttcaaaatattaaggcttagcacaagtgaaaaaaagaatgctgaagcatgtttaaatttaatcaatttaatgacacctgtaatgacacctgctgttataaaataggatttatcataaatgcttcaaaataatgagaataagttggctctgatgtcacagtgtcagctacaaaaacttaaagaacacactatattactatcgcccttggtataaaatatacctagttgctacttagctacttaaatatttgctatcccttgcaaaacttttaaagctcacatctttacaggtctcccaaccctacttctctatacagtttatcttgctgatgagtcagttttcccttaaatgaagatatatggagcatttatattttagagtctaaagttgagaatgtaaatttttaaactttaaggttatatttcaaaaaaaaaaaaaaaatgggcactgaccagagcagctgagtggaaaatcttgctagtaacaaaccagtactttgaacttaattattaactcacctaaaagaaccccagttattcttcttgccattacagaatagaggctcacaggtatttagtccacgtgttctctaaatgtgactttaaagctggaatatgactggataaacagaaaggagtatagctgttatcccaaatgatgcactataaccatttagcattagaggctttagatccatctgtgaattaagagacaataacttaccaaacactttattctgtttcctttgggagtagttagagcccttacaccaaggccccaccaagaaggatggaggtggtgggacccactttcccagcacccacactgccccatgcttctgtattgtaaccacctcctcctcaccctcagcttcataagggaaaagccaaatgtgctatgatgagcacgatgcatgttttccattggcattgtctccaccacctacccctgtctgtttttggacactgagattgcaatttgtagtgtgccagatggtctgactgtagcaaataagcacagagaagtggggcctgagtgaaaccttcctagagattaaataatggaccatgtattgagacatagcaagtgacactccaaggttaaaataatcttcccttttaaattggcattgatttatgtgatgtctgcactggagccctagacctcagctcttcaactcacagtggcttcaacagtcacacagcccagattctgctgaagcaactacccatgggagaatgagtaacagactactcataaactgcccctcctcattccgagctcagagagcccatggttcattttccggtcccaggatcctcacttgccctctggcccccatataggaactgatcttttcctctgctattttccttatgtcatctggagggagaagctcaggtatgagaaaccctctctcctcacagcacaaatccaaaaagggatggagaaggaaaaaaaaagcaaatgaggaagaaaaaaaaagcaaatgaggaatagagagacagcctaaggagtgaggtcaggaagatggatatgagtgtgtttatgtggatttttgcatgcctacttatggatgcaaagaataaaaggtagatttctctctctatcacaaaaataatgtgcaaaacagctgctcccattctgcaagattgttcgcaaagaagcaacaatgctgagcatattcttcccctcaaggaaaatctgctcatgttccagtaaactgcacttcattgtttccagctctgggggttttaataaaaatttgataggctctgtcaactactgaagccatcagacccacagttccttactacactttaaatggagaaaaaaaaatacgttttatctgcggaggccaagtgctggtggattttatatttgatgttgtttttaaagctccatattgaaaatgcagagttgtgttatcttacatcaccacactcggtctcagctgttggagatttatgctgtgcctcccagcaaccaattcttgtattcatttctccaaattattgatccaaaaaaaaaaaaaccaatttgctagcaaaataatctatttttcttttcacatattaaatcataacttcactttaatatccacagactagaaaggacagaaagcctttatccaaaatccaatagacaaggcctttccaagcagtgagttaaacccaacgatggcatataaagtgtaggctcccttggagacactgcaggcaaccttcctgggcccagaagattgagaaataaagtttaggttctaacttcattgctctccttctctgtgccccaggctccactggctttgaggaacgttgtggacttaggcacagacatatggactttcagatgttggtttgattacagacagccccccaactcacctgagtcttcccttcctttcatgaccctccacacttgcggctggtgaaatggttttttgcagataactaagaggttcggctttgagccagccttaggccttattttcaagtgagcacagctttcctagcccacatattatgttttaacttgctagggctgccacaacaaaatatcacaaactgagtggcctaaacaacacaaatatatcatctcacagttctgggggccagaagtcaagatgaaggcgttgtcaggaccacgttatctccaaaggcactagggaggaatatcttccaggtctctctcctagcctctggtggttccttggccatcttcacttcaaactatagcaatagtgatctgaatgggtacctctgtatattttgttgtctaaatatttctgtaccttttaagttttctatcagcacatgtatttttaatcagaaaaataaacttaatggaaaaaccacatgattagagattactggctcatttgcccaacagatatttattgaatgccaggggaggctttcatgaatggcatttcataatagttgagacttgattaatgactagtttctggccagacaaaaaggtgagggcaaagagtggtgatctggaggctgagatgggaatgaccttggtcagtttagggagctgaaaaaagaccatgacagctgaaacttctgaggaagaagagtgaccaacatgatgctggagagggaaatgagttcaggtcatgcagagatttgaaggtgatattaaagttttgagaaatggaggccagaatgtcttttgaaggtatttctctgatcttatgtagagaatatgtgtgtcaggaaagcaagagtggattgtaaaaggccagttagagactcactgcaatcctggcaagacatgatggtgggctgcctgggtataggcaggttgactctgtctcttaagagaagagaaaacatttggggagacagagtcaaccaaactggatgactgatcatatacaaggaataaggatgagggtgattatattagtctgttttcatgctgctgataaagacataccctagactgggcaatttacaaaaggaaaacgtttcatggactcacaattccatgtagctggggaggcctcataatcatggtggaaggtgaaaggcacgtctaacatggtggcagacatcagaagagtttgtgcagggaaacttccctttataaaagcatcagatctcatgagacttattcactatcatgagaatagcacaggaaagactcacacccatgattcaattacttcccactgggtccctcccacaacatgtgggaattgtgggagctacaattctagatgagatttgggtggggacacagccgaatcaagtggtattgagaatgacactcagagaggaagagttcaggttttctttctttccttaattgttttcaattgtagaatggaattcctgctcaatttaacaagaaaaactccagagatacattagaaaaaactgattctttttctcccatttctgtactaaacaatgttagcagcgtgatgtaactctattttgttctctcatatgtgtatttgttgcattttttgtttcagttttaaacttgttgactatgaattgcttctagaatttacaagtacatacatcaagtagaaaattagatatatgggtctaaaattcctaagggaagtatatgcggggaatataaattagatatatgggtctaaaactcagaagggaagtatatgctgggtttataaatttggctgtgtaaatattacctaagccacaaaggtaaataagagtgctggggagaaagtgttgagtcacaaagaagaaaatcctgaggaaatccaacctctaacagatgagggaagacgaagtcacagagataggaagaaaccaggagagtaagctatcatacaagccaagagagtgacaagtgtagcaagaaggtcgattactgaagagtccattagagtaagcagcaaagatattattattaacattagagggccacatcagtggactgatcggggccagtgtcaaatacatatgtgtttaggagtaaacaggagttacataagtggtgtcaaataaaaaattgcacctgacaaagttaaacaggcaaggaagacattattcaaggctattgcaataggagagagaaggtagacttagtctgagctcaattccactgaaacaaagttcaggagagtttttaagtattgatgtaagaaagagaacacacttccttgtgtttgctaattggctttacccaaaggaagagtaaactttctcatatctttgtgacaggaagaaggtttacaacttggcacaaggctgaagttaggctcctaccctcccacagagcctggaagatagtggcactatcttctccatgattacattttaaagggatggctcccagatccttgagaaagacgttcccagattgtaaaactaacaggaggcttttagaaagatttacatctcaaagggatagtgaaagaacttacaaatacagattttctaaagcgattggtctagaaaaagagagatcagggtatggaattaggaacaagcctgtccaaagttgattccagctgagggaaacattaaggctgtcttggtcagtggacgcaaaaagcactaactacccttttgagaaaattgtccagaaatgggaggaaagagagtaacttaagggaaatgtgtgctggggaactatatgctctttgtgtgttaagtttaaagaaggtagaataggtaggtagtcagagagagaaagagaagtgttaaagaaattggccaattttagctacattttacttaactttaccaaattggccaatttcacctgatagcaataggtaacattaataaggaaaatctcctaagaaggcagaaggcatgggaatcagaggatttatagaggaaacagccatgataagagatgagacagctcattaactacacccagatgtgcatgcacatgggttggtacattcattagcaggaattagaagtggtgactgaagcctggcgcagtcgctcatgcctgcaatcccagctcttacggaggcagaggcaggaggatagcttgagcccaggagttcaagacctgcctgggcaatatactgagacaccattctccacaaaaaggaaaaaaataaaataaaataagtggtgcctgagaacttgcatttttttcagtgtagttacaggcaaggtcacttgcccaaggactgtagagtctaatgtagtggtctgagaacaataaagaagacttgagaatagggagagcagatcagagatgctcagatacatggagaggccagttgaagtggccagatgtggatttggagtagtgagtatttatccccagaggtgtgatgtttctccagaagcaatctccttaagaagtcacaaagaagatgcatggggtgtccaaagctggaattatttagaagaatatttaacaggaatatttaacaacaggcgagagagacaaagatgtctgcacaaatgacctagtatccataaaaagcggttacagaactattatctgactgcttatactgttacagattgaatgtgttaaaaattagcggatttttcttttgtattttaaattgtttttcacccctagggaaatgatgaacatgaagctggaggcctgaaaggagacaaggtaatcagattttttttttttagatggagtcttgctctgttgcccaggctggagtgcagtggcacaatcttggctcactataacctccacctcccaggttcaagtgattctcctgcctcagcctcccaagtagctgggattacaggcatgtgccacctctcccggctaattattgtatttttagtagagacagagtttcaccatgttggccaggttggtcttggactcctgacctcaggtgatccacctgcctcagcctcccaaagttatgggattacaggcttgagccactgcacccggcagtaatcagattttcaaagtgaatagaagggcccagtattttatacggacttacacattcccacgtagggggcagccccctggcagcagttgggttgcatctctgggagggtgtccagcctgcagtgggcaggggcctccgcctgcctcctgaccaggcagtaggattcgaatctgcttcagggtccagcaaggactgctgagtagcagttggctataagaaagagaacatatcaaggggaaattactgtaataagataaatgaaatcaggacacaagacttgttttgtaattaaatgtgaatccgtgtaggtggcaaaaacaatctgaagacccctttggcaaaatgcctcaagcccaggctcactattttgtgtcttcctaattaccaaaacataagctgccctggcagccatttttggtggggttttatactgtccagtagtggtttaaccaaataattatttcaaaatagttttaaaactaagacactgataaatttccgttgcattccccttgtcatttgcaggtttaattatcatagctgtaaagatgacagattcacttccccattcaataagatgtttcactcctgtttgattctgaaattgtaatgaccttggattccatgtgaatgtgccattgtcagaaaaaaaatgcacattaaatctacaggcagagatgagtagtttgaaaatactctgagggaatgtggcctgtgagtgctactttcattcattcacctgtaaaaattctctagattgagggcaggggattttgacatgaatccaagaaaatatgacttctgtgtcttataaatcagtgcaaccaatccattcaaaaagtcgtacacccatcaccagaagttactgctaaaagatagtctcaccagaaactaggagcttcttacagattgatgattgaaaatgaaattttctgctaaataaataaataaaggcttgacattctgaaaaagacatccaaaaattgattatacagcaatgataagtcatttgtgtgagttagattttattgctagtacattaacattatttcctgtaacctaatagctaacagaaaccatacgccaccataaccaacgcattacattttaagcaatgacttctggacatatgcaggctaaggggaaaaaaaaggaaaagaaagccacaaagcttgtcacataggacagctgagcaaagaagagtgttgtgacttttaaagtatttaaatgatgattcatttcttgaaacaaaacagctgggttctgttttgctgtgttcattaggaaacatatgttacttagacattcttaagacctcactgatgagaaatttgattctgtaaaacaggtgtgtttcaaactctaaggaccttttctattgctcaaaatcttttctaattgcttcagaatcttaagtagaattaggaaaagccagtggcataactgttccctcctctcactcaaataaataacacagaaaagtctacagggaacttgatgcagtacatgatataaagagacacataaaaaaacttttaaaaagcgtgattaacaggaaattgccaataaacaatgcataaaataaacaaaaattacaggtggtagctcgcacctgtaatcacagcactttgggaggccaaggcaggaagaacctttgagcccagaatttagaccggcctggacaatatagtgataccccatccctacaaaaattaaaaatattagctgggcatgctggcaaacacctgtggtcccagcttcccagggaggctgaggcaagaggatcacttggagccaggaggtagaggctgcagtcagctataatcacaccactgcaccccaacctgagcaacagagcaagaccttgtctcaaaacaaccaaccaaacacaaacatgagcatagcagttgctggaagggtgaaatcaactctacctatgtaagtctacttagtatctcttctgaatcaatacattagtttttaaaattataatgtaatttaatgtaatgtaagtcaccacagtgaaaatttaaagctccatcaagctgttctcagagatctctgttgcacctgtggcgaaccccagtgcttctgaatcctggctgcacattggaatcacgtggaaagctttgacaaaatacccacactcaggctccatccacagagactccgatttagggtaggggtcttatctctatttagaagtgtttcagatgactctaatacacaaccagggctaagaaccactgagtaataggaagagcatgagctttgggacaaaaagttgattgtggcattaacagctaggtcaccttgggaaggccacttcatttctctaagcatgcatttcctcattcacaccatgggcagaattgtatctacacaaagagttgatagaaggattaaaattaaataagaggaagttactcaaaagcgcaataactaaaacacatataaagccctcactaaagatttgttcttttctattcacccatctcaatctttccttcctctcatgaggtctcatttagcacttttgaggattaattgttgttctcattcttagcacctggtcttgctcatctttgtatctcccaccataattttgacaaagaagggactcagtttgtgctgtagaataaaatatttaaccagaagaataattaaacacataagtgattcaccattcctttataatatgctacttctcaatgcactgaccagcaaaatagaattactaaaagagccaaccctttggaacccgacactacaatgaagcaccaggacaagcacaaatagcactggaatatacacaccagtcacccctggtttagcagccacatcctgtatcaagaacactacgatacagggagaaccacgacttgcagtaaatggccatggagaccatccacatgaccagtctaccagtgtggaaatgaacgatccctgctctgtggcttgactgagactgacaggatgtggtgaagggataatgtacttgcaagttacttgaggagaactgctgctttatagagacagtagaacaaaatatcagaatatcttagccctcctgagaaaatagcaggtgtcttgtgaggaagactgtcagggaaaaggtggagtcactacagcaccaagctaatagcatcgaaagtgtcaaactgaaggagagtctttcctaatgcaaagtaacttcatcacttgtgtttcaactcatctctacagtgataaatcactgaacattcaatttaaataaaaaatacaaacccatatgtgtctaaggttcaggtagaaaatgcttttgcttgcagaattttatgaggaaagaggtctctaagatttccttccagcccaatgtcatccaacgactatgtggaaagatggactgcaaccccttttttgtcctgcccctgtttacctgtagagcagctatgaatatacttacttttatttcaccatgtacattgtcctccccttcccctttgatattggcagatttgatttttacaagcaattgctagactccttctcagctttctacttttattttattaggcaagtctaactagtaggcatatttttccttcacacctatacaatggaaactgtagcacctaccagatgggtaacacgaaggtcactctgtacaccctaatgcctatacaagtctaattgtttattttctctatcaaaccaacaacaatttgttcctaaatgtatcccccaacttctcccttgccttaccttgaatataatttactatgtctaggaaaaaaaatggcttctcttataatgtggtaagaataagactgatgatacacaggatgtttagatactaccatagaaaaaaacaatacttacgtagcttcctctgaattaggaaaaagcctgtatacagcacactaaactttaaatttgatggatattgcttcaaaaggcacattgaatatttaaattaagaacgtgagtgaattcagagaaaaaataagctacatatatataggtggtatgtagacatagcgaatattacacagttgggatgcggatgactgaactttgggaaacactgctgtagaatatttgtactgacaggtctgcaagttggcttcttatccatttggttccttggctctccaacagggccttactattactagctgaaagcctaatggtataaaaaattagtactgaggtgagtcagaaaagcaaacacttctttcctagtatcaactctcacagcacaaaatacttctatgaccaaatacatgaatttttcacacacagcaagcaagcaatcagttttgcaacagacaccagctgattgtcttctaattccattcaattctgacactatttacctggtggtagcaacagatcccacagattgagggctcaatcccacaatgctgccttccacttcatatgccaatcgaaagccccgtgttgttttatctgtgcttttgaccaactggctataaatcggggtccttatgaccccgtccgcggcactaatttgctggaatggctcacagaactcagggagatatttacttacgctcaccagtttattataaaggatgttacaaagtttacagatgaagaactgcataaggcaaggtatgtgggaaggggtgccaaggttccaagcttccatgccctccctggtcatgccaccctccaggaacctctaaacttcagctctacagaagctctctgaacccagtccttgtggtttttatggaagcttcattatgtaggcgtgattgattaaatcatttgtcactggtgaccaagttaaccttcagtctctctcccctccccagaggttggaggtgaggctgaaaagactgtaatcaagccttggtccttctggtgaccagcccaatcccgaagctacctaggggctgccagctaccagtcaactcattagcatacaaaaagacgcttattgctttggggattccaaggattctacgagttgtatgccaggaaactgggaggaagaccaaatatgtattttacaatattgttatcaagcagatgggctcactgcccactgtgcaccgaagccaataactatggcaccagcttttcagaaaagaaagattgtattgcaaaatcagccagcaaagagaccggaattgggcttaaatttgcctcctggatttggggattggggcaagttttaagggatcagagggcaagggacgggatttagggatgttagtttggcagaatctgattggacagcttcaaatttgaccatttatggtaaggtatgttgaggcagatttttgccctggatattccaggctaatggacttccatgcttctgaaagagttcaggttctggtcatgtcccggtcttcttggttccacccagggggtggaattgttggttccagctgttgttacaagtcaaagctttttctgttatgcgtgcctaggctgcatgacttgcagttttgggctctgttataccttaaaggtaacttgacattttgttatcaacagagtaggccctgtttgggctggttccacagttatactatcacatgaggttttaaaattttagtaaaattaagattaaattaaacaaaacgtattccataaatctagaagactaattaatacaaacatgatcttgtctatccattacagaaaatcacaagacatggattaggatatacatataaaaataagccaaagattttagggctgtagtaaatttatacttgaagcactttttggtagctgtttgaggcttcaaaatgaacaattaggcacatccacaggggtcaggattagagatgttcactgcagccttgtttataatagagaaaagctgattacaatcaaagtgcccatcggtggggctgagataaacgctggtttattaacatgttagaatgctactcatctgttataatgaatgaatgagatcatatgtatcaatagagatggatattaaaaacaatgctgagtggaaaaaacaagtcatagtatgttatttatgagataaagctatttatggaatttgtttcaaatattcaataatatattgtttatgattccacatatgcagtaaaagtacaataatataaactgaaaatataaatactaaattcttgagagtggctccctctgggtggaaataggaaatataggggatttcttctttgtaaattttttaatttctttcattttgggtacctggtacatgaaggcttggtgtattctactttattatgttttctgtatttattcttttgaagtaaaaaaataggccaggtaggcaaaaacggtatatgctcagaaatgtaatggtgaacatcattttgcaaaaatgctcttgaagttagggaaaaaaaatcagcattacatatcttctagagactatgtttaatttaagaattgtgtaggtattcagagatcttggtaaacactaaaaggatgcacaatgctgagactcctctgaagtctcattagtgatataactcctttcttaagtattacttctcaaattatattttccaaaaacactctttatatgtcacatacagatctctcttcaaggtttttgaccagaacctcttagacatttctaagctactgctgtcaccacatctacaagaatgccttatttgcccacagccaatcatctaagtagcattataaaccctggaaacagctgagagactcgttttgcttcatataactgctgactctgcccacctaaacaaagaaaaaagtgcctgaaataaaatgagtctggattattgtgccagttaaacagtctgatgtctttgagatcacacacaaaaaaaattggttttggcacaccagaacaaaattataatttttctcctctagatagatattctttcctggaaaaataattaactttgtttcacattacatttaagtatcataatgaaatatatggatttctaaaagacataaagccattgtgaagtactgacaaacacattatcataaaaatagcctaagtagattcagaactttgcattgtctgttggatgctaatagataaattgtatagttagcaggagagcaagcaatcattctgtatctgacagtcacaataatgcttctctaaccatctgcaaaatctctcttctgctttgtcttgaaagggtgaaactggactaccaggatttccagggtctgttggccctaaaggacaaaaaggagaacctgtaagtattttagctttgaggacagaggaagaatatctaaaaaacgggattaaaaatacgtttccaaatcagccccaattccacgtgccttggttgatcctgtcatgggaaacaacagatcagatcttcaagcaagtactagctacgctatgcactaagtctcttacatgtatttacacacttaatccataaaaagtttccataaggtcatctattatcacctgcatacttcaaatgatgaaagtaaggcataaagaggttaaaaaactttgcccaaagtcacacagtactaagcattggagctgtgaatcacacctaggtgagttgattctagaacctaaagtttaaaatcacaaagctcctctggtataactaaacactgcagctaaaataataaaatcaatgtatcaaaagactagtacaaatttatccaaaagaaattggaaacacatctttctgctcaaacaactgttctcagtgtaccttctgaagttatttttctttcttgatttttgtatgatcaaagtggcttcccaaccactttttggtattactgtggccagtttctttcaaaatgtagttctttttgtggggaaaaagagaaaaaccctacagtatcatttatattcaaataggaccacctaaagtgattagagaaatcataggtacaaaaaatgacttgttttaatgcttcttttaaaaaagcagttttcaagaatcagtgagaatcaggcttaacaaatgtttcatctttgtttaaagaaaagtaatacatcttattaaaccactctacccctttctttacgagactgaataaaggatattggtttatcaggggataaaacatgaagaggtcactaaattgcctgcatgacaaacaggaacattatttaaagtattcagtgttacaaagccaaattttccctatgcttcagctttaaaaaattaacaatgacagtaatttttgcagctttagaatcagtctgtggcctatgtaccccagttcttctaccttcaggagtcgtgcttgcccttagtattcagttcaagccttcttacacaactacaggatttggcagtctttaatgaggttctccaactgagtatttgcaataatgtctggaaaatctcatgtctcagaaatccagcctggtgcatgcccctggtacctgccaactctctaggtgctccacacttggaggttcctcttaccatctcttagctgcttctctaggtctccactgtcttccctccaaacctgaacactgacaccaaccttctcttaatttccacatgatgcatggaggaccctgcagtaagattaataaaaattttactggaaaatcgaggatttttagagcagaaaggagaaactttcagtgagttagagcggtgcttctcaaatgtgaacatgcacttgaatcccactgattctaagtcagtaggtttggaagcaggaccagagagtctgtgtttctcataagctctcagtaatgctggtgttattggtccatggaccacactttaagcagcaagggttgaaggagttcatagttcctaggagtcataggccttttcctcctgcagggatttcctctggctttctttctggctaactttcaagggcagtccatgtatctcatgaggactgcctttagccctgttttccttaaatagagcttcttttcctcctaactcttctccataccaggtccctattcatcccttaattatcccaccaccccatacatctttacttgccaccttcctctacccctacattaaaacaacgcaaattttacattattacggagagcagtttagctttttatggtctcaaactttctcttccagaacaggatgtagactttactttgcataataatcagaaggcccaaacagaagagtagtattcattcaaaggtaaattctgaaccactgatcccgaatggtaactaaaatggcaaattttcccccaccataggacattcagaatatggtttgatgtgtaacacatcagagctaaaatatacttaagatcacctagttgaaccccatgattttatagataaagaaaggggagctctaaaagattaagtgacttgcctcaaatagtagccattggagccaggactaaatatcaagtatctagacaactaggctcccgggtttttctctttttttttttttcttttataaccagttactttagtcaatgtggccactaaactttacagtggctgtaaataagcaatgacatgagcagtgtcatataagcaaaaacaagcagggaaataagaatataaataaagccttgatctaatatatagaaatcaaccactattaagatagttcatcatgttgggtagatatgggtatatagttgtcccttggtatctgtgggggatgggttccaggactctcagaggataccaaaatctgaggatgctcaagtccctaatataaaatggcctatttttatttgcatatcacctatgcattctcctgtatacttcaaatcatttccagattacttataatatatattacaatgtaagtgctatgtaaatagttgttatactgtattatttttaaaatttgtataatttttattgctgtattattttttattgtttttctttttcaaatattttttatccacaattgcttgaatccatggacacagaacttacagatatggttaacctcttcaagtcattttcattaaagtaaaaataaaaactaggaaactatttttaaaataatgagtttgtatatttaagcacacaattaaccaactggaagaattcaagtgaatgtctttcccttcaacgtttttatcaatttcttgctgtcattcccatttcacattcaattggatgtgtgtgtgtgatcgttttctatgtggactaggcaataggaagctttggccttgggcagcattccaatttgtcagccacttgggattttataaatgatgttagaatgattaactcattgttcatttgggaatataaaggagtttttaaattaattatcatatatttcctttaagctgcaaagacagactgtgtgacactctgggtatttttggaggtctgtttgcaatgggaatctgagtttggcctatagggtttatccacaccccggtttggagagtttatttctaagagcgtttaattctattttctaccccttctccttagggagagccttttacaaaaggagaaaaaggagatagagtaagtagatattttatcactaccttgggttttctacttcattgatttgtttctctctgattttctggtatgtttactttggagtctaatagatttgattaaataaggtccatgagcattttactttttcctctgtgatttttaactcttttattttgataaataagaaattttaagccttgttaactgttgtcatgcaaggagacttcaacattggtttgagttttctaatacattgtttaaccagttactaatagtgattggacatgaatgttatacaagacatccatgtaggatatcaaaaatataaaattaaaataaaagatacatttttttccaaaaattctgttaatggcacaaagtggatttatcaaatatattaataagtcacagaaaatttaaaaagcaaacttattatagccagtatcatcctcttttgtataaccttaattttgttgtgatttttttcattaagcacatataactaaccattaagcacatataactaaaagtagaatcaccaacacatattaccttaaattctactctccctcattctttctctgaagttttaattctctgggacatgagattagttggtgtcaaattataactatgtcagctaagtagagaatgcagtgattgctaatgggacatgataattagtgtcaaaaatggcattgggggaaaaattattataatgaagaaatcaagaaagtattatttattagtagtaagtattttgaatcatgttttagaatgaactctccttgattttattgtgtcttccataatttccctttttattgtatgttaattagtagaaattcaattaaagtatcagagatgtccatttccatctgaatttaagcattacccttatagtaattattttatttacagggagaacctggggtaataggatcacagggagtaaaggtaatttcctggcattcttcaatttcctctccaaccttaatgagattatgaaaattaaagaaacattgatctttccttccccccacgtgtttagggtgaacctggagatcccggaccccctggtttaataggaagcccaggactaaaggtatataagaaataactaagatttcttgggaaataatttgggaattgtagccattctgtgtaaaacatggtgctttggtatgccactcattttcttcacaaatgctctccaagactttatcctgtttccatggtgattttccccactggctgcatttattacacgcatagtaactgtcttttggttttcacaataggatttctatactctttttcagagcatattcacaatagcatccctaaaagccttaagagtaaacaatgtgagctaaatctacgaccttgagctatattctaaaaggaacagaattcaagtttcagtttctaaaccaaaattatgcaacgttgagttgcttgagtttcccaagtgggattccacaggagtgtcccaagagagcagcttttggaaaatgcaggagaaattaatgtggtgtactcccagacaatgggtagggcaagttaccaggtatcacctgctggtgagaacacataaattaaaagtatctggaaactatcttggtaatcacaaagcacatttcagtattatacagataaagtgggaaagtgggatggtggaaagttggtcttcctatacatgaagatcacactattctttacaaatactcaggtacaatctatctttttttttcttttttagcaaagctaaagtatataccaccttttattttagggtcagcaaggatctgcaggctccatgggacccagaggaccgccaggagatgttgtatgtataatgtctttgatatttctggaattgaaattgagactaggacatgtttttaaaaacatcaacatgtgttcaagtaactgagttatccctcatttcccaaagacatgggtcatctatgccacaaaaactgatcatacctaatgtcaggagctattgggaagactagacccttcatataatcatgtgaggtccttttgagtatcattagcctaataaattggtttttggagctcaagttaatcaaattgtcattttggacatgcttgtcagtgctgtaccagcagtagaggagattggaaatgtcaaaagaaataaagaacaccaaaagagaaagcaaacattttcaatattcacagtttttagttcaagtctccatctaaggaagacatttcgaaagcttctatcattttctagcaaaagccttccaaaaaaagcaagtcttttggctaaaagtatgtctggaggaagatcgacagattgcattataacctagctttagtggacttaaaatactcaatacacctttctattcattatccggatcagctttttgttccttggacaactttctagccttctgacaacttgggagctgcgagctctccatcagttcacacttgagcaaaataagaaaaatccttggccataactccttggagactgatcactatctgactatgattagagttccctccaggcaactcttaggatctctccttttttcatgccctgggaacagccccttaacctcacattctattctccatgctcaccgcttgagcctctcctgtctactagtcggtgcacatattctgcttggtactttgaacacccagtttatagagcaaagcttttgatcactcccctatgccaagtaatgggccactgtagataaacctagtggacagatcttatgaaaagagagataatcctggtggcacaagtggagccacaatgctcaaaaactgagactaagtgatagtggccagagctataaaaagaacaaaatctaaagggaaagagccactgtttctaaaacatagtaaaaatatatttttctagttgccctagagttctttggaatcattatgtgatgctgccaaccaccatccttcctcgatggcaataatatgggtgagacgttcggttcaattcgactttagtttctttcctatggcatccaggtggcttcacttgaaacaacaaaccacgtagaatcactaatatttttccaggtcttaaaggccaaaatcaatccaactccttctattaataggttatatgttaaaattctgttctcttgacagagattcacagatatagggaaatgttattgtaagagatgttctcattactctttcctattaactctgagttttctagggattgccaggagaacatggtatcccaggaaaacaaggcattaaaggagaaaaggtatagtttacattttcctcattttatatgttaagtagataggaggaagagacagaggatcataagggagatgaaaggacagcccagggcttctgggattgtacagattgtgcacattaactacaatgtaaatggcaccccctagagttgtgcatttggcagccctggttctggcacaggaatgccatgtgacaaaatgaactgacagatgaagatatcaggagtctgaaagtcaagctcagttaccaatcctggtataaacctaagaagtctcttaatcttgcaggatctgtttcttgatatctacatggaaacagtgcattaacgttgaaccattattggagaataacttaaagaaaacataaagatcgtctatagaaatttattaatagatatgcccttttgtgcatacacatgcatatgtttcatgatactgctaacataactaactgcaaaatctaaatgcactgaacaggcatgaattaggtactcaataaatattattgagtgagttggtgagtgagtgagtgagtgagtgaatgaatgaagtttgactggctatgatgacaacttaaaacaatggaaaccactacctcctcacttcccaccatgaacctgagcatcaaagtaagaatcttaccttgttttctacagggagatccgggtgggatcataggccctcccgggcttccaggtccaaaaggtgaggctggtcctccagggaaaagcctgccaggggaaccagtaagtattagcccttttgttaatatttttcttgcaagttcattaattactacttgtgggttcctagtttcagatcacaagtatgggaataagtttaggtctgcaaaaaaaggaaaaaagaacttaaaacagaactaccatttgacctagcaatcccactactgggtttcttttcccaaaagaaaataaatagttctacaaaaaagacagatgtattcgtatgttcattgcaactctattcatagtagcaatgagatggattcaacctacatgcccatctacaatagactagataaagaaaatgtgatacatacaaccatggaatactatgcagccataaaaaggacaaaatcatgtcctttgcagcaacatggatatagctagaggccattatcctaagcaaattaatgcagaaacagaaaacgaaatactacatgtcctcacttataagtgggagctaaacattggttgcacaccaacatagtagagatgggagcaaaagacatgggggactactgatgggggagagttgaagggaggcaaggttgaaaaactgtcaggcactatgcttacttccttgggtagtgggatcattcacacaataaacctgagcaacatgcaatttactcatgtaataaacctgtacatatacccctgaacctaaaataaaagtcaggggaaaaaagaaatattcatctattcatcttattgtttcttttttttttttttttgagacagggtcttaatctgtcacccaggctagagtgcagtggtacaattatggatcactgcagcctccacctccgggattcaagtgatcctcccaccccagcctcctgaatagtggtgacaacaggcacacaccaccaagcctggctgatttttatattttttgtatagatggggtttcaccatgttgtccatgctggtcttgaactcctgagctcaagtgatctacccatctcggcctcccaaagtgctgggattacagacatcttactctataaatcagagataaaacctcttaaaagtttgataagcaaagggctttcttctgaagaaaatatacatgcatacaacattttgcatatgattttggaagattcctaggtcccctgaatcctaggcatgaattctgtagagatctatggatcccagtcaggtacactggttttaaaacataaacgttcctagggcagtattgtaaaacagaaaaactacctgaaatttctcttccagaggttttgcagatatcatcatggtttgtcatttgcagaaaatgtctttgtgacccagactattcccaggacattgaaaactggactgccggaaaatctaaataaccaatgtttttaaaatatgttttatatgcctttgtttttcatctcctttgaactttttatgtattaaataataataatatttctcaatatcaggtgcctcattttataaataaaaatattttatattttaaagcaactatacaaaatctataacatattgaaatttttactccccgttccttattcttttatagaaaaagatttattcaagcaagatgaagagtgatgaaacatattttagttataacttctaatgtgtttataacttttctagaagaagatatgtattcatactttttttcttttagggattagatggaaatcctggagcacctggtccacgtgggccaaaggtatacaaatattatagttaatttttaaggaatgaataattaacaaaatacagcagaaaaatgtatgtctcttgagccttgcagtaacagaagcctttcatttcacagggtgaaagaggacttccaggtgttcacggttccccaggggacataggcccacaagggataggaattcctggcagaacagtaagtgaaattcattcgagtccttgttgattccaacattgtgaaacaaaatccagtgtcaaattttaacaaggagaaaagaatagaaaggtcagagacggaaatacaaataaacactatccagagatgactgatcagcattgaggttgtatcacttaagcacagagacagtacccactgtttgtttattaacttacagatgctggtcacacatacactaagtttggattagaagcagtcatttaacccttatacctctattctatatattaaaaagcacaaatacatgtttgtaagatagtaagaatgcctaatattaggtcaatatatattacagcttgtttttaattaagttaaaacaagaaattaatatttaaactggatggagtatgcataagtgaaatgacaccaaaaaggtctgagtaacgtcttcagagtgaagagatgatgttttcaatggtaaaaataaataatgagaagtttttaaagtatttaaactataaggacagagcctagaacagcccctattaataatgaccactatatccacacttgtagatcaaataatagtaaatgtacaatttttatttactatggaaagacataaaacgtttttgaacaagaaaagtggaaataaatggttattctaatgacattaatttagaaaattggtctgtgtggtgtaatacaaaaacaaactaattgttttcatattatgctcttaacattcaacataaatacaattctgacaccagctgtgtggggttttttttcccctactcatcaattccccaatggacatcaactgaatgttctattagtcaattcatgtctgacactatctacctggattaagagtcagatcccacaggttaagggctcagtcccacaaaactgacccctacttcagaggccaactgcatatctggaccttcatgacttctgtccaaccagctataaactgggagcttccatgacccccacctcaggttctatagtttgctagagtggtccacagaatcaagtaacgctttcttacgtttactggtttatgatatcagtaaaggatatgataaacgatacagttgaacagtcagaagagatacaaagggagaggtctggaagggtccctgagtgtaggagcttcagtccccacggagttggggtgtgtcactctcctggcacatgggtgttttcgccagcctggaagctctctaaactccatattttgggattttatagaggcttcatcatgtcagcaagattgataattaactatatttccagcccctctcccctcttcagagaacgcggggtgggctgaaaggcaagcttctaactgtggcttggtctttctggtgatcagctcctatccaggagcccaccgagagtcacctcattggaacaaaaggctctcctatcacccaagaaacccaagggattaggagctctgtgtcaggaaccagggtcaaaaaacaagtattagaacaggactttatgttagcaacctattgttaaggaatttacgagggttttaggagctctgtgccaggaactgggggcagagaacacatattattttatcacaatatcacatccttatattgaagttatcatgaaaagttaaaagaaagcataagcagtgaagggttatgttgtgaatgagggttgtctgatttgccagggcaagaatgtaaaagaacattggagatggaaattaagccaagtaaaaacttgtatcagaaaattattagaggctgggcctggtggctcacacctgtaatcccagcactttgggaggccaaggcaggtggatcacttgaggtcaggagtttgagaccagtctggccaacacagtgaaaccccatctctgctaaacatacaaaaattagccaaacgtggtggtgggtgcctgtaataccagctactcaagagactgaggcaggagaatcgcttgaacccgggaggcggaggttgcagtgagctgagattgcaccactgtacttcagcctgggtgacagagtgagactccatctaaaaaaaaaaaaagaaaagaaaattattagggaagtgatggtggttgaggaaaaaatcactcagggacacaggataaataggaagggaggaaaaagtagctttggcaagagcagtgatatgaatatttatttatttaaataagaaaagaaaaatcagtgagcagttactgaagtcaactgctaagaaaccagctcttgacttacttaggtgaacattcctcatgcagaagttcatggttacctaagagcggtacaactaccatcgttaagttccctgataatctcccagcctcattttatttatccgaaattctaattttctaaaagtagaaaaaaaaatcattgattagtgttttacctcctactcctgtcactgaacactgtttctggtgatttattccaagagataaatgactcaaagttgaaagcagaaaagaatccctgagccagttacccctgtgggtggtcagtttctgacaggtggaatttggatgcattctttgtgccctcatgaatgtgcagtgacagattatggtaatgatatagatgtcccaagtccctgagcaaaatcatgttgatgtttccagcaacaggtatctgattaagtattcacctacgacctgaaagtcttggccgactttgcagttttccacgtgtgtacggtggcaaaccctgttgttcctctaagtaaactacaatgcttagtcttttatgtcacttggataatttatggacattcttggtggaattttaataataaaatctcatttgtactcagggcgcccaaggaccagctggagagccaggtattcaggtaagctatttaactaattttttagcacagcaaagccagcttgcttacttgggggaaatgactgaaagaccatcctcataagtaactgtttttatttccctccttttccagggtcctcgaggtctccctgggttgccaggaactccagggactccagggaatgatgtaaggactttctttatctaccctcccccattttaatctgcacctgtgccacgtgcaaagattgaacatggatacctctgttttcagggagttccagggagagatggaaagccaggcctgccaggccccccaggtgacccggtatgtagacaaaccttgtctgatttatgtatcttaaatgcacccagaagccaaacagcctaccaagcaagttttgctgtccaaactaattagaatgctcggtgactgcttggtgattttgtttatccccattattttgtcgagtgaaaaaaaattcaggctggatcagcatttctgtgtgtgtgatgaatacttatttcctaagggcataattcaactgtacaattttgccccaggctgagccttggcatataatgtctcaatcccattgaaaattgagataaaatatattgccacgatttctattttttctaatgctagtggctaaatgaatttcatttttctaaatgaaattttgcaggtaagttgcctacaatatggtatagatccattgattctgtagctttaaaatgttgcgatgattaaattatgaaaactggcttgagtaggctcttagaaaaagggttaggcacaaatgtgtgtttcaaagttttattttaggttaaaccttgctttgagcaacagtgaaacccctttaaatagcctcagactcggcagttataatttgagaggccatatggtacatgacattgtattaagagtcttgtataataaaatccaaatctggcttctcagttctaagcctcacaaatcctttctacctcccacagtgtttgggccttatgtgcctttataagctatgtgtggaggcatattttggcattactttaacgccactgttgagtgaatcacttgtgcatttttctgggaatcttgcaaaaatgttacttgggtttacaccgtgtctctctgaaagaacatctcaagacgtgtggccaaaaggtagcccaagttccttcagtgtttgtcttgcctatcacttaagccaactgtaggttctttgaacttccatgagaaataactttaaggcaaacttatctggtacttttcatatttctcaacagcctgatagtgtgttcgccagaggaatgatttccttttaataaataatttatctttatgtattatttaaaaccaatgatataccagggacagcataaaggttgccatgaaaatataaaatagggatgcacagtcaaaactatgatatgtgtgtttgcacattcaagagagaagaatagtgaacatttttcaaaatttgttctgaattctatcagtgccatgtgcacatttctttatacgaaacataatgttaagccagtgattctaaagtgagacaccagaagcttcatggcattttgaggaaaaatgtctacattatactgtatgtttatattgtattgtgttcatatataaatgcatgtatttggttttatcttcttaaccacagattgcacttcctctcttgggagacatcggtgctttgctcaaggtactctattgctatgtaagaaattatgtgttaatttccaggaaaaattagaaagaaaaatatttagcagaaattgagtcaattgcttagctggaactaaaattcaatttttaaatggcaggacatctttaagataggaaaataaacatgtatcttatatatcttgtgccatttatcctaattctttcactctcttcttctttaccagcctctcattttgggtggggcaggggtggagggcagctggtaggatagttatgaattggctacagggaaggaattatgtcattagcactctggagtagattattctctcctctggaggaacatctttctcttaatgggtgttgactcaccctggctcactactgtgaaacctaatctttctcgctatatctggcctggtcagtcccaagatgaaaatcagtgctgctctataaatagccacttacaaggctgaattttgatgtcataggattttacaaaattccacagttgacaagtgccctaatacctgttactctgttcaataaaaatcacctctacctattatcgtctcagggaattaatcttgctacctcttttttttttttatctctaacacttccctgtattttatcagtaaaacaggtagggggggatgataatggcacatatgtaagggtatgtatttgcatgtttctgcctgatatgctaagattgagtgaggccacatgaaaatcaggcccttgacttcatactcaaacacagtgtgttgtatctgtctttgtatgaatggacgttgtgtatgtgtacacacacacacgcacacacacacagactacagttatatatatataatttagtttgtatttctagcatttagcccagtgatttacacaattatttgcacaatagtaagcaggcagaaatatttgtttaattgaattcaaaagactcgagttccggcatatacatttgtaaggtagagttttgagaatagatatataaacataagtgtaaatatgaatataaatataaaaatatattaaaggagtttctaagacctccaaaaccagcagtttttataagccagagaagaatatttgtggggatttcaggaaaatcttatatttattgagttaaaattacatgccactcaatatgccactttacttatatcatcttatttaatttccttaataatcttatgagttcaggctgttgcgcattcccactctatagatgagagaccagaagttctcagcagttaagtaactttttcagtcatagagcaagtaaatgtaacattaacacaggaacataggtcctcagacattaagtcctagattctttacaagacagtggtgctggaaatagcaggattgccggagttatatcatttcagaatacttagggttctttaaggatgagaaacttgtatgctttagtagaaatgaatatactggtagaatatgggatctcacagaacagataaaaggaccatgaataggctctgacgggaagtggaaccagggctctcagaagtggaactaattgacaatctcgcccgggaatcatccctctaatgagtgtgctctgccattgcaccaatccctgcatcatttcactaaggttctgagtccataacgagcaggacatcttgactgatagtctccacaaactgtatacaatagaagaaaggggaggtatgtagttccccgaacaaaatccaaatacaggaatttagactgtgggttggatctgtcatgccaatgtaataacatcatgttaaatcctgatcttgttaccctatatgttaacactatctctctctgccttgagtctttagacaatttgatcatcctgctttctgttcgcaaaaatatctttgattaaagtattaaaaagaactggcataattacaggcaccttcaaaggccttcttctagattaatcagcatatcaatccctctttgaacgactttgtgtattggttaataattgatgcatctttattctttccatgagaaaatcttaagacatttttccaagaatgttaacaaaactcagttatttaaatttgccattctggtaaccctaacccaaagaaaatgaagtcagtttcaaatgactcttaaaaattatgtttatcataatgattatcattttttaatgtttcacttaaacagtctattgaataatctattctaaaatgttgctccatattgatatgccaaggttttgctccatattgagatgccatgtttgtgtctgcagataattatctttttcatactttttgaaatatggaaatcattttgtttttcttaagttctcaagtgtctctttatcttcatagtttttcaggtgtcagtaatagttctataaatatatatatttaactcccctgccaacacattaccacctgtgaaataatccaggtggtaaaattcatctgggaaacattgcatataaccctagttcccttttatatattcagactctaagaaagaccaccatgaagagagctttttcacccagcattttttttatgtactttaagttctggggtacatgtgcagaacgtgcagctttgttacatagttatacacgtgccatggtggtttgctgcacccatcaacccgtcatctacattaggtatttctcctaatgctatccctcccctaccccccccaaccccccacaggccccagtgtgtgatgttcccctccctgtgtccatgtgttctcattgttcagctcccacttatgagtgagaacatacggtgtttggttttctattcttgtcttagtttgctgagaatgatggtttccagcttcatccatgtccctgcaaaggacatgaactcatccttttttatggctgcatagttttccatggtgtatatgtgccacattttctttatccagtctatcattgatgggcttttgggttggttccaagtctttgctgttgtgaacagtgctgcaataaacatacgtgtgcatgtgtctttatagtagaatgatttataatcctttgggtatatacccagtaatgggattgctgtaacccagcatttttgagatgatttgcctcatgtattcatcagggttctctagagggacagaactaatagtatatatgtatatatgaaaggaagcttattaaggagaattgactcatgtgattacaaggtaaagtctgacaataggctgtctgcaagtcgaagagcaaggaagccagtagcagatcagtccaagtctcaaaacctcaaaagtagggaagctgacagcgcagccttcagtctgtggccgaaggcctgagagcccctggcaaaccactagtgtaagtctgagagtccaaagctgaagaatttggagtcttatgtttgagggcaggaagcatccagcacaggagaaagatgaaagccagaagactcagcaagtcaaccccttccaccttctgcctgctttattctagccgagctggcacctgattagatggtgctcacccagattgagggtaggtctgcctctcccagtccaccaactcaaatgttaatctcctttggcaacaccctcacagatgcacctgggaacaatactttgcatccttcaatccaatcaagttgacactcagtattaaccatcacaccttgtaagcttttcagtatcgtgcaaaattagtgttccaaggagcccatgtttgaaaatcagatttacattgctattcattaggtcaaaaatattgaatttgaatagccatgggctttcttgccagcttcttatcaataacaagcttcacttctttttcatgtttaaagattcttccctttagggaaaaggatggaagaatggaaacttaagttgtcctaccttctgtcaactgttaaactatctcccccactcagtggcccttattctgtgcctttcttggtcatattcttattccaacaatttatttaaaaataagcctatatagagcttttcacacacactttctttagctgtgtgatgagagttatgtttatcttatgagctcagacacttgaagtcaagccttcccagatcaactaaaggttgcagagaaggcaatggaaaggtcatttcacttagatttcctattgtcacttggatatgacctaggagtcaagtttatgtcagtcaagtaattatttctctcgagtgcctccactgacaaaatgttagtaaactgtatgtagttggagaactaattttgctcccagaagaacaaatcctttcttcacaattttttctgttgtttttaaaatggtttatgctataggttgtttgaattctgtaatcttgctgggttttctaaactttattaccactcccttttaaaacattctgctaaacaattgagcctcagtttttgttcttgacttatgtgtcttttccttatttatttggaattttctatttaagtgtcattggagacctgttttaaaaataaaagttcatcaatatcataaacagatatcactgatgagctttgtaaacagtttttgcctcacaaaaattaatgtttttaaattggatacatcaagtgtctgaaagcagaatgacctatctatatcactcatctccagaggttccaaaaaaacttcacatcacatgaaacctcacctttatagacggcttttatgactccctcagtaaccttatctttatactcattagaatttctgtggcaactgccaagccagtgtcccagggctgaaaagcaacaaaggagaagaaggaggtgctggtgagcctggaaagtatgattccatggcccggaaggtgagaagcctggctgaatgtttacgatccctgtgggttacatgtagtgcatcctctcagttctgttcttcctctgtcttctagggtgatatagggccacggggtcctccaggaatcccaggaagagagggaccaaaggtaagaaattctctcctccactttcccctgtgggaacctcaatttagtatgaaaaaaagaacccgatttgaaaatagacaacttttaaaatacatactatatatatatatgtatgtatgtatatggagagagagagagagagagaaagtgatgtaaaagtcacttgcaaatgttgccatttatttgttccctgaccctgtccaaattacatgccccaagtgttcttagaagagatttttttcatttccaaaagataagaaaaatgattgcatgtgctagctgaatgtattgtctttttagggaagcaaaggagagcggggctaccctgggatacctggggagaaaggcgatgaggtaacagattcttttctgattatatagtcctaatattgattctctttacgtggctcaacagagtaaaaatgttaatttttctatagctcagatctgatgctataaccaataaaaacaaagaccacttagagcttttaaaatgctgacagattttaaataacatatttatgtttattaccaagggtccggttttagagacaaggaaattaaggcacaaagttaatatgtcagttataatttttctgttttcatttaacagataataattccagctctctcaaaataaaagtaagggaaaggaggaagggaaaatttactcaaaagaattccaaggtagctaagagatttaaaggaatagtagttggacaaccagcctagcagtaagggcagctcaagaacccagcagagcttccctgggtaccactaaactctgattaaacttcagcaaccttggattgtctgtgtctttgctcagctttcaaattcttgggagaaaaaaaaactgtcagaaaaatcttcttgttctagtttacatcagctgctcacccgttggactaaggttccaagtccaatgtgcttttgagataatggtataattttctgactgtaagccatggtgatgctcaggacatcatttttttcttacataattcacattaactcttagaaaaaccaattagaatgatgaattgctgttagtttaaacagttttgatactactaattcttaatgaaagtaagtaagccatctggcatatattaaccttgatgttattgtagaaaatcataactatataaagaaaatctatttttctaggtggagttatattttacattaccagtaatcatcatgtactattgtttctaattaatattgcttgtaatctagaaaactttgaggtttgattttttcccaagttaaaaattgaataccaagtatattcaatatttattttcatccataaataaaacattatcttcaaaataagttattgtgcttttgcttcctcatgttccacagaaggttttactaaagtacaagcacaataactgattttcatagtccaacagctttgaactacctccacccaaaaggtaggctttagaggcaattgagaaggtaataacaaaaagatcaggaaataattggaattcaggttttgtataagtaactctaagttaaagtcactagaagttaattttcattgattctacagggcacttttctctcttggtgaactgaaatccattgctaatattcctccacactttagcgggctttttcttcggtacccctcataaattctgtaacacagttcacaaaattgtacacaattctcattacatggggagttccagcaagttcaggagattcttttccattgtttcttcacactacgtgaataatatgaataaatctgaagtaaactattgactcctttaggccttgtagggggaataaggtggtgcagctttttctttagcagatgggaaataacggatataatcttgtcttctacttggtctcagatattatttgaaattacaatttgttgatttgtcaaagtgaataaaactttgaccaaaaacaagtgcatttccaactggccaatgaactataccatttcaacatacagtatggacttgagatctaatcttatgaaatctcaaatgtctattgtactctaagtggaaaagatacagagggacaccccatctctttgagacttctaattattatgtctttcatctgtttggaaaatgagagagaggagttgcctgcttgtttgttactcttagaaaagcaacattttcttccacatttttcacagacgttgttgcacagctcaaggtagcaacttggaagatgctaatagaacacatgctaacctttgatggagtgatttcttgcttgaaatgcaggtcttcctataatatcttgggataataattgataaattagacatgaaaaatatcatcagccagatattatagcaacagaaaatattcttggtagcaactgggctaggatttgcaaaatgaaatatcagagcagggtaagaacatagctccaatggtctccaaatatctctgcaataaattttaatttgtattttagtttggcactgtatgttaaattgactgtcctactctttaatatgtatttgtcttctttaatgatcatcttgtcttctaaaattatcttattgccctttatgcatccatagtaactttcacttttactacagaatttcagctttttcagagaaaggctgatgggaatgattttttatttatggactgaggtttattttaaagtttaatgtggtcatcaaaggttaatgaatcccaagcttataaattagactatctaaaaactcactcaacatctctggactgattcagtgttgagactaaaagtagcaaaaaaaaaaaaggaatacatatatacgtatattttatgcatgtacatatagaaagaattttatggaaatatgggtattttgaggtaaagaaatttatggtataacatttataatctccagtcatttagaggtgccattatcaatgaaaatttttttactttgcatctataaacctgcatacaagttaatgttaggggaataaaaagaatgagtaccacataccgatatgtagagcctgcacatgcacacatgcccatgtatacacacatacacatacacacacacacacacacagcactgccaatgagattgataaaattttgaagaaaaatatgtcaacattctttaacaccaatacacacaagatttggcccaagacttatgaggaattctagcatgttcaagtagaatttttaagcccttcttcatatcatatcacatgaatagacctgaagtaacacatgatgccatttggcattgaatggacaaacctagaagaacttggtccttgatcccactgatgcaaagaaacttgatccagctcacagtcctatagaatgctgataatcaatatgcagtaatgtttccatggccacatcatctaatatttataaagtatatgaaaatgcatatatcataatagtaaaaggtaaaggaattgtatgatgacaaagaatggtatggcaatccagaaagaatattttactcagtaaaggagactaaatcctgaaagaatggaatcattcagtctagaacttgatgtatcacatggttatctgaaataacaaaagcatattttaaaatagttttttctcataatagaagtgatctcagtccactattgaaaattgggaaaatacaaaaatgcactaaaagataaaatttctccctattcccactacccaggagggacttctggcaatagtaatgtcatggtccacaactctattagtccattttcacactgctataaagaactttcctgagactgggtaatttataaaagaaagaggtttaattgacccacagctccacgtggctggggaggcctcaggaaacttacaatcatgacagaaggtgaagaggaggcaagcacctttacgaggcagcaggagagagagcaaaggaggaacttccaaacacttacaaaaccatcagatctcctgagaacttactcactatcatgagaacagcatggggaaaaccacccccatgatccaatcacctccctccctctacatgtggggattacagtttgagatgagatttgggtagagactcagagccaaatcatatcaacaacacctcatctataaattccaaaaccaaagcctctgaaaaccctggaaatgtttcccaagtttggctttgtttcccaagcaaattcatttggcagcccaatctggcctaactcacacggagcttgtctattccactctgtcagaatatcatgttttgccacagaaatatttgtgtgtttattagagggcactgcctcaggcaccactgcagtgtgatataatattcagtatgtatatcatgttacctgtgaaatgaagtgataatccagaattctaaaacacatctaacactaaagtttctgataaaacttatctatttgtcgtgataaaataataaaagcctgtatgtatcattcccatcttttaggaagtacatttaaaattgtttaaaaatttagaccctgtgctatataagatttgtgactttatttttacatgttttctaacttttttaaaacatgattttaataattgcaaaatatttcatgttataaattgtatgtaatttatctaacaatattctgttgttggcaaatgtatcaaagtaacaaaactaattacataagttagctaatcttaccatttcttccttgatatataaatgtatcagcatcttaaatcctatccggtataattagtgctattctacaaatctaaggaggggagggaggggaaatctattcattattatgcttaagccattaaagcgttccaaatttaaattcaccagtgagccaaatttcttcttataataaactgacaagctaaaataaatattatatcataaaacatattccatttttccctagctgaatggagcttaagtgtaatcatctatttcttcaatggcattctgccaatctaaaatttgtatttccatgttttaccagtacgagattcttagatactactgctgacggagtggccctataaaataagaaatgctctatgaatcaccagattaaattatgtttgcttcagattccatgtcatggcattttagctcacccttcttactctttaaaactgagtattcacacatattcttacttataagtgagggctaagctatgagtacgcaaaagcatacagagtgatataatggacgttggaggcccagaagtgaggagtataggcgaggtgtgaaggatgaaaaactacctattgggtacagtgtacactacttgggtgatgggtgcactaaaatcgcagacttcaccattatacaatttatccacataaccgaaaatcacttgcacccctaaagaaaaatttttatttttgaaattaaaaaattagaattaaaaaagtatatttgtatatgacaaacattatgtttctcgattagctaaataagtgtttaatgttcaatggtcaaaatatttgattaactaaaatgccttcttcccaatgatataacagattttatgatgggaactatcttttccagggtcttcaaggaattccaggcattccaggtgctccaggcccgactggaccccctgtaagtatttgttaaaacgattgcactcacagcttatatctgctggtttgatgcaaggtgaattaattttcttcattgccttttgttctctgtgcctctatgtagattgtccagatattgcctggaaaagtagcctcatccaagctctcagattttcatttagtattacttaaggctactcagtgtcctggggacttgcctcagaattccaccagaccagaaagcagtctgcgattaagctagtgtgtttgaaatagaaattgcatataaaagagcattctattttttatttataattttttggcactaacctttagaagagatagtcaaatggcaccacaaactgagaatttattttctaaaggaaaaaaaagtgtgctaaggattatcagatttcatttatttttgttcctatgtataaaataaaatacctctattttagtcaaggctttcactgcccctcaaacacaccatcaaagccttcgtgtctttcactgtcttgttttcctagaacagaatctcttttgctttatacttgccaaacccaatctctcattcaaacagtttaattctagagtcatcagataaaatatagtgcatgcagttaaatttgaatttcagataaacaaataattgtttaatataagttcatcccaaatattgtgtttttatttgctaaatctggcaacccagcacatgcttcaacttctccacctcatcctttcttagagttcctatgccaatagagtctttaccacaccagtaggaatgtaattatatattttaatgttctgaaataaggattttccataattaaagttgtgtcatttatgcttccgccacagttatacagaacaaacctggctttaaattgttcactaaaattaaaaacgatgaaaaagagttgtgaaagaaaccatgaaaattatagctaactctgttcccaaaggattaaaattaaattttatttttcagtggtaaaatgcagatcatagaactcaatatgcacactgttaattctgccgccttgaagtatttaaaatgttgatccctaccaaaactatagctcatttagaaaggcataatgttatgtaaattgccatttaaacagcaagactagattcttaagtgtatcaaaaggttccaattaaggtcattaaatgtggttgacgaaggtgaaaaagcgaccacaaatacaaattttacccttccaagggcttatcagcaggatacagctgctgtatcagccagaagaaacataagcttctagggcttatttaattaggatcaaatgaccttcaaaatgtgtaagttttagtaaccaacttccaataccctttggccatttaattgttgtttctgtaacaaacttagttttgtgttttacagggcttaatgggaagaactggacatcctggtcccacaggagcaaaaggtgaaaaggtacaaaggaaaagcctcacttaccatccaaactggggcttggagtgggagcaggatgagactcttcacagagagagccataaaatcaagcaaagcctaaaagtagaaatgatggtagaaagtacctattcttgtagtggatttggaagaacacaggtccaaaggttattctaaacacgggagatattttcctaggagaaaggataaatagaatattggttccataaaacaaaagttcaggctggattcagaatcctgggcaaccatctatgtggaaggattgggtgggggagcctcctggaaggatgcaagtaatgtggtgtctaccagggagttccagccacaggggctgtcagttttctatgacaaaataccatagacggagtggcttataaacaacaaacatttatgcatatttctctcagttctggagtgtgggaagtccaagatcaaggtgctggcagaatcggtgtctgacagagtctgccttcttgttcatagatgtcacctactagctgtgtcctcacatagtagaagggtgaccaagctcccttgggcctcctttataagggcactaatcctattcatgaaggctccaccctcatgacctaatcacctcccaaaggccccacctccaaaagctccagacagcagactggctctcaggaccaagattctggtaaccaaagagcttgcagagacagtcgagaagttctgtccctagacggtcatgggggaaatttactgaagaaccaggatagcttgtttcctggggagatcagttattggacagatgggttgccatggtcagaaaggaggaccagcattagatgagtctcagacaggacaccacacagttttacatgtttaccccatttaagatctaaactggctctattgtactagtccaggcagatccagcaagtaagtggaataagcctagctatttagatcggggaagtaagaatcaagagtccacatgagccactcaagcagcttccacccactcgtcaggacacaagttccctgaccaacgtggaacataatgacatcaaggagcaaaggaatcccaacacattttgaaggaaacaatgactttattctagatagtctctgcacatttttttctgattttatcccaaggagcttgcccaaccccactagccttttttctctgttctctatggaaattattcagtcatagacttgcctttgaagttaatgggaattccacactgagatgagctttggggcacaaatgagagtgaatatatgacttttaattgtgccgggggaaaaaaaagacttttcagtaggcacatatttttccttgtttgttgactcattagaactatgacataattctttgaaggacactgccagttgtcagcagaatgtgacatgtcttagagagatagccacatcaaagcagtttgggaaaagaaacaatatgcttgttctttgttatatattctcaggcagaagcattgcaagaaaaactttacagtttatttttattgataaacatgaacaaaagattttatgatactttcgttacaaaaaatggcagggtattggaatgaagtccttgattacatttatgggaatggactaaaatccctcaaaattcttggacattgtgagtagaaattttactctatctgaattcttttttaattaaccatgtcttgccatttcccctgctatagagggacttaagagattttatgaggctattattctgagagaaaagcagagttataggaagaactgctgagagacaccagagggacttcaatagctctgcttattatggaccgataaacatctatggtttataaaaatagaagtgaaatacatttttcaactttcaacttgaattcattttcacaaattctattttcagtctgcttctcctgtaagtctaagactgtttaaattgtagtgactatttgctttaaacagtactataccacagttgcttctgctcaggaagatgtgtctgacttgggtgtaaagtcagatattaacgtaggaaatggaagatgaagtttccctcctgcagacacaacacaggttgtgatttttttactttcgtcaaattatgtggatgtcccctctggttcccaaaagatgaaggtggtagaaatgaggctcaaagtgaaggctgactcagagccacaatcccagagcccactgcctgcttgtaggagagttccacattgggagagttcctccagctgcactggaagtccaggacatgagcacctgggttgtctggctccatctaaaaataagcttcgtttctagagctcacacagtgagagtcagaatgggtatgggaaaagacctttacctgtcctgcggtctagaaatgtatttcctgggtaaaggagagcccagctgaataagactacaaggctgaaacaacatggcaagtcatatcgatttcagaagatggctctgtgattaatttcagaagatagtttgtaaacctggggtagaaacgtctacgccgctgatatgtctatatatcccttgcagggcagcgacggaccccctgggaaacccggaccacctggaccacctgtgagttgttctaggcttaaaatttaaaattcatgtgtttacttaagacttttataactcagaggtaagactacatttagatgttttcaaagataaaattcttctgaatttcgtgtataaatataaatgatagccaatgtagctttaaagagacctgatttgttctccttttggttcagcctcaatgtgcaatgctcagattggcatactgcgggtctccccatcttggatttaggaatctgggtttgtgctccgactctccacttcctggctcggggcccctgggaaagtcatttaaccttaatgtgcttcattcacagaaaggagaagggccagaaaaatagatcctttccgctgatgcgagttggtagaaaatcggatattatgctatatgtgttcattcccattcatgatgtctgagatgcaaggaaactctatttatgtagctcttagtgaacaaaaagtacaagaggcatcgatgttttcattattgtgattgagacagatgcacgctccgtcagggaaacggtggagaggagaggagcctctctccgtggcaagtctgccctcatgtggggccacgctcgaatcgcagccgagccgagctgagatatcacgcaaaacacccttttctaccccacctcacaggaatactttaagaaaccaaactcaccatagaaagggcagaattgaccgtgactttccgaagacaatgaggattattatcagtctgcgtgcagttgcatgctttgtacacgtaaatgaagagattagcactctatttcctaaacttgtttcctaaatctgttcatctgtgttactgaccttttcccttgacaagaaagcaggacggaaagtattagggttcaaatcctaaaattcactccttcccccgtgggcagaacagcaaatataacatgagttcatgaaagggacctataattttataatgcacttaagatgtctttgtcttccctctgaattctccaaaaccatccatccttcaaaacacagtttaaatgttttcttccctgggaaacctcctttggaaatctcagatgaaaatatcctttgtctctccaggacgtagcacactaaaatatggcagacattcagtcgctgtcagataaatgagttaaataatagagtaataaatggatggagcgtttgtcttccatcactagtgtttggaagatgcatgcaaattgtcttcacagaacactactggccaccatcatacagaaacaatgaaacagtgacttcttcaactctgcaactgatatgtgaaaactgcagaaaggaaaaggcagatttgactattgattctatacaaatgtttaaaaagaaagacaaaagattctaactaaaatttttatatggaaatttttcctaaatgctaaaatgtatgatttttttaaactatagaataagttctcctttaagtgttggttactctaggacatgtcaatttttttcaagatgttcttattctcttttatcctaaagaatttatttttgtagaaacatccacacagggttgtggataatgtcatctccccatttaccttaattttctatttggtatgaaaagactgtggaaaaaaattacttttcagtagccaaattgttccctattcacatcttcatcagcactatggcattatagcctgcaggttagcaggctgtaaacagttagtataaattgacaattcagaaactgaattttaatgagcaaatattttcctccaaatgcattagtgtctcatctgtcaaacctgaacattaattaaaccccaactgaaagtatccgtgtgcttcaggtgtagctcacactcccttttcatttccctgcatttgctttggaaaagctaaaaattaaaatgtattattttacttagagtattaaattccctttgtaaaatagaatagaaaaaagtaaaaaatagaataggaatagtatcatttggtaaaatgataaaatgtagagatgcaaagtattaacttccaagaataattctgtatctcacctctttcctaagggtattccatttaatgaacgaaacggcatgagcagtttatataaaattaaggtatttatatttgtaattatttaaaatccagttatagactgctgtaaattcgtctcatctttctctttttcttttcttttcattttcttttgaagggaggtgtgaatgttcccagttacccagggccacccggtcctcctgtaagtacagttgtttatcatcaaacacactttagctgaacaaccacaatgaaaaacaaacaataaaaacctcttaagttcactgaaaaacgcatgttatgaatacagccaaattttacagcagaaggaaataagtaaaaccaattataataaaattgagaaaatgtatgcagccaaaataatggaaaacagcatttttcatggtggtgtcacttttttcattgcaaatctaagaactaagtcaatgtccaagcaatcatttttatgaaatttccatcaagttatatttattcatcttattcttcaaattcaaactgtaattaaagcaaaacttgctaatattcgtatgtgtattaaggcaaattggacaacagtgtttcttattctgtaactgctttggtcattatttgaaaaatgactttccatgtttctcttacagggcccaaaaggcgatcctggcccagtggtatgaatgttcccatgttttgtgtcatttagaatattggtctttgttaaattttgaaagaaaagcatcgggcaaaatggcctgccttcttaggtgttcatcaattaacatgctggtggtgacaagcaggccacaatataaatgccagcaatatgttctctgtttctgagatgcattagtcctgatgttgtcactgcccttgaggtttgtctctttccgtcagtgtgtttttaaaatcatcctgtgatggaggaagacacatataaactctgataaatggggcactttcttctaatagccctcttctgataattgattcaattttaagtagattgtggaagagaaatacttactggaaagaaatcccttaatatatctgccatctccccaacaaaaaaaaaggaactgtttatttgctttaaacgtcttaggcaattattttgcaggagatatgttttgtcataaggctgcttattaggaggaatgtatcaggaggttatgctcagcatggaaggagatcatgtcctccagccgcctaaaggacgataattgttctcagcatctttctgaaccatggagcctctgtaaaagttctgccaaattcaattagatgccctttattgctgggcattttctcctgtcatgtctttttcaagcatatccttcatgtttcatttgtatatattttaacctttgggtatatacttgaaactcaaatgtacctaaagctgaaataaattttcaaaacactttccattgccatgtgaaaaaaaatttaaagccttttcattatagtacagtttgttaaaactcaatgaataaattttaaaccagcaaagggacaagtcataacaagtaatgtttttatgtctaaaaacatattttaaagagatgcattaaagagctgtttgattttgttattgggcaatatatattaaaagccaaattgttatcccctgaaagcattgtttcaactagttaggatcatattctgtaattcagtttcctttgttttactattcattcaccctgtctaccctatctttacctgaaaccaactatacgcttcattctaattttaattttcttacatcttgttgataaaaatttcctcctggtctttccctctcatactcatacacacaaaacagcttctctgaatcatttaaaagcacctaggcttctcactgactttttgggaacattctttgaagttcttgcattaataactgcagattaagataagaactttttaagtattataataaaggataaattataatttactggcattgaaaaggggctggcaacaaaaatgtagacctatttgagtagaatttgaagagattagtcttcaaatttcttagctacaacaaaggatgaagaataaaaactgattgaagtgtgttccttgcttttagagatgtgaattgagtgagtgaagcacagaaacagaaaaatgcaatcatgaaatgaaatacacatttagtgtacacattcagcctcatcctggatgaaactttgaagttactcttttgggttctctgtcagcaccaccctgcaactctcatcatctcccaccagctgtcctgtagggaaaaataatagttcctgccatagaaataatccaggaatgatagaattgtagatcacagagcaaaaacttgagaagtctttttgaggttggaaatttactcttccaacattcttcaaatcccatgacaatagacctgcctcactatttctaatcttctccataaacctttctagaggaatattacccttaattgaatttattatcttctgaggcgctccatttcattcctttggtattcagtttataaatgatgtttaattaaatatttaattattgctactttcaacaaatgttgattgattgagcacctctgtcttaaggactgttgagaatgtaaacaaggagaatcaaagagtgtgtttcctttgtcagcaacctagggcctcttatacagaactttatgcagaacagaatctgaacttttttttttgatcagttgtcaagttacatattaggggacattttaaaagatttctgaaacatagaaagcatatcagttcatatgctcactcactaagtattctgtaataagggcaatgttataaataataatgaagttatatccctggtaatatttttgaagcagattggaattatgtatgcaaaaacacacttacagagaacacaatttgaaagctcttgtttctttgtgattatgtctaaagcatccggtgtcctaagaaaatatttgcagtgaacattaatttattaacaagaaggcatcaaacaactccccactttatctcttttttaacttaaagccctaatgcaagcttgtccaacccatggcccatgggctgcatgcagctcaggaaagctttgaatatggccaacacaaatttgtaaactttcttaaaacattaggagatctttttgtgtgtgattattttagctcatcagctatcgttagtgttagtgtattttattggaagacaattctttttcttccaatgtggcccagggaagccaaaatattgaacaccccttccctaatgctttttttgttcagagttagcaacttccttcaccacagcttttcccaaagtgtttcttgaggatctacaggctccagctagcctgggaccatacactagaaaatgtaaagatttttaaaaatagaaaacactaatctacccccttccagtgactcatcaacttgagcaataacttttagtgttattggagataatgatcctggggtcaacttcttaagcattcacaattcttgtccagctgcagagaatacttaaagatgataaacactgctttgagtgctccatcttcatctactcttaaacagtttattcttattctctgaaaatctagcagcaccaggtagctcacaaattggcaaactttattaaagccccatctttcattctagttcttattgaaattggagttatcactgagtagagggattcattctgattagattctcaatcagaatgaaaatgattaatcagaaaatatacctctctggagaatagcttttattctcaaactattttcaaacatcaaatgcaataatacattacttaaaaatagggcatatcatttccttgctaaattacacatcaatgtttggggtgggaaggttaagcaaaaaaatctttgctttggaaaccaatgcttaaaaacattttgattattgctcctgcatttcttatgttcatatttaacagggagagcctggtgcaatggggttgccaggattagaaggatttccaggtgtaaaggtaagcacagaagttagaaatgtgttcatttattcaacattcaaaattgtttactgagcacctaatgtgccaaaaactgttttaggttagggatatataaaggaacaaaacagacaaaaatgtatgtactcatgggacttacattctagcaaaaggatatagaaactaaaagaataaacattttaaaattacatcttattgttggggctatggaaagaaagaaaaagtagaatgggttaaggaggatcaggaatgctgacggggtaggagggcagtatctgagcaaagacctgaaggaggtgagagggagagccaagtcccctccagtctggaggaataatgttccaggaagaggaaacagcaggtctaaagagtctgagacataagatttcctgatgtatccaaagagaccaggggagggagtgaggagatagtcgtaggagatgaggtcagagaggtgggggtggaggtgggaagtggccttgtcatatagagcagtactactcaatgtatagccagtggagaaccagtgccagtctgcagaccctttgttatgggttcagtggcaaggttattacagagactgagagtaagcacctaaaaacatgtccagtaatttgtctaaaattgtctagcaagcatgtgatggtagaattatctttgttcatgatatgttagaaaataaataaaagattgctcttttaccacaggaagtttgagaaacactaataaaaaggcttaacagctattgtaaggcctttatctttcaatctttgtaaaatgcagagccatcggtgatttctgagtagtggcatgagggaacttgcagccagagagttgcaagggtggaagtagggaagccagttagaagatatccagtaatccaggtgccaggtgatgctggctcagatcagagcagaaacagtggagatagtgagaatgcctggatttggatatattttgaaggtagcactgataggattttcagattgattgcattattagagaataaagaggagtcaaacacgaacttcagttttatgacctgagcagtttgcaaaatagggcggacatcatctgaaatgaggacagctatgagcaaggcctattttgaaggggtggaattatcaggagtttaattttgtacgtgagaccaaatttggagatatctgttagacagcaaagtgaaggtattgagtaggcagtctgatataaaagtaaggaatgtggaaaagaagtctaagtggagatataaatttggctgttctaagcatagagatgctgttgtaaagcggaagactggataagattaccaagggaatgccaatagagtttttagaaacagaagagtcaaggattgagccccaaggccctccagtattaggagatcaagaaaaggagcaaagagcaaggaagactaagaagtaaccagcgaggtaggaggaaaacttggtatcctacaatccaagagagaataatgaatcaaagggaaaggagtgatctcctgtctcaaatactgcaaataggtcaagtacaatggagatggggccaggtagaatggtcaagtattgaacattggatttagcaatgtagaggtcatggatgaccttgaccagagaaattattatttcactatatggtaggaacaaccgtggacttgaatgggtttaagagagaacgaggaaaaaaaatagagtcagcaagtcagtataaataatgctgacagagttttgctgcaaacggtagcgaataaataggccagaggctgctagaggaagtagggtcgaggttttataagatagattttgaagataataaaaatatcagactgcttatatgctaaaggaatgactcagtagagagggggaagatggggatgatgatgctggagagaaaggagagagtgctgggccaatgtctttaagtagcctagagggaaggggacctagtgcatatgtggagggtttggcttcagagaggatagtttatctacagtaaaaggggagaaagcagagtatggggacagaggctgataggtgggaagatgtattggatggagtctacaaaagttgttttctgattgcttaaattttctcagataaagaggaagcaaggccattaatctgagagcaaggtagggtaagaggttggggagaaggtccatagttcagggaccacagaagtgtgatgactgctcagccctagggaccctcttgaggttcatggtcatgaactgaagtgagacctctcaacaagactatgtgtgctggcaaggcacagtggctcacgcctgtaatcccagcactttgggaggccaaggcgggcagatcacctgaggtcaggagttcaagaccagcctggccaacgtggtgacaccccatctccaccaaaaattagccaagcgtggtggcaggcacctgtaatcctagctactcaggaggctgaggcagaagaatcacttgaacccaggaggcagaggttgcagtgagccgagatcgtgccattgtactccagcctgggtgatagagccagactccgtctcaaaaaaaaaaaacaaaaaaaacaggactacatgtgcttttccagccatgttcagacattcaggtaaagacacagaataggaggggagttggatttcaacaatgttctgcttttgacggtgagtactggacggaagaatgggaaaagacccttactggcttactggtatacacaagggaatgattctaacaagtaaccatggaattttaactaggcaagagagagggagaggccattgagggagtgaaagataacaaatttgtaccatcaatggattagggtttaggggttcaaggtactcaaagagtgaattagaatgatgtggaatggtggtccaaagttggaacgcatgaaattgagattatggatgggcagcaaatatttttactgacaaagtgtcaggtgtaactatgaaaataagaggtaagttcattcgagaatagtggttaaggaatgagaggcatgagacatgcaaatatttcattgaatgaaaagttctagtatattaattttaaaaatgaaaattttgtaattcaaaaggaacagagggaaattgatgtgtattgcctgtttatgtcctttacccatttttctatcagttatttttttctttttgatgatggctatgctccatacgttaaagacattacttctatctcatgtgttggagttttcatcctagttgatctttgcctttcatttttacgtttaatcttattgtaaatataaccttaatgtagtcaaatctaacactatatttctttatgatttcttgttttggttttatgcacaaaatgacttctacttttattttcaaccaaaatcagaatgtcactaatatattctttgagctcttttataatgtatattattttatttttatataaatctatgtggaattcatatgggatataatgtaaagagaagaagcaaacttttttcaatgaaattatccaattattagaactgtttgttaaataaaatcctattataaatgccggtctgtttctgatatttctgttatagtattttgatatgctgcttaatcttatgccaatattccattatagctttatttattatatgtttaaatgttggtattactagtatctctttattattattcttttaatttttttatcctctcagttattatcccaagtaaactttagtatcatttgatcacactgcaattttgtaagaattgcattaaatttataaattagtttagttagcaatgacacctttacaacattgtcttgctctccaagaacagagcatatctcgtcattcattaaatcaagccttttatgtccctgagtaaagttttttaaattcagtttctgcccccaaaaattgccattttattatcccatatatatagtcgttagtatttttagcattgtcagctttatctaaaatatcacattggctcttaaaaaggagttgagtcactctgttgttcagagcaattcaagggatcttctaattggccaaatgagaactacaaatcattagttgtagatcattttattctaactctatatccaatgagacaaggataggaaaagctttttggaagacactcaaagtgcttaatcttttaagcaagagtaatgatcttttgaacatgtagaataaaaatattgactaatttaactataagtatgtaaggggacattaaaataggtcacagaaatgattatgcttgctttcattaaaactattatttactttagttttatggaaaataaaaaagctgtaacgagttcagttgtcaattagctactcagtttgctatttttccatctacacactagcttcaccccatctaatatcaataacacttatcagatccaaaggaaagctttaccaaatccaaattattatttgagaattaatttcataactaaagacttcattgatgtcattaaagtagcaatgtttttaaatcccaacagggagatcgaggcccagcaggtcccccaggaatagcagggatgtcggtgagttcagattacttcacatcattttcacaggtaaacggttctatctccatgatacacctgtggccagggatcaagacaggcaggagagcataccataactcccatggcattaggttcctgacaattctagtttcataaataatgccacctgtattttccacctccacaatcctctatttcttttgttttgttttgttttttgtcctcttttattttcttcccaagtcactttcatggaggggagaggaaacacagttactatacattaatttatgagcacagctttggaaagtttattgtgtttctctattcttgtcatatttcaaggtttctcagtcttcaaaagacagagttcttatcctcaggcatgtacttcaagttccttgtattaatgcaatctgcctgagttattccttagcccagtgttattagcagagctttattgctgctaatgtttcctcataaactagcccttcaatcctctcaatcatttttgttgctctctggtgtcaaatgttttaatctcatcaaggccttttcaaatgaataggaagtgttccaggaaaggttgaaattatttctctgagccctagagatcattctgatcttcattcatgatgctctaattaaaattttgtggtcacgctttatgaataagaggccatttatcctcttgctaggtgctcctgcagggcaggtccaggataacattacaggaaagtcaatggaaaccatgggcttgtatcacaagaatataagaaagataagataagataaaggccctacaatcaccacccacagtcacccaccgagatctactgacacccaacaccacccaaagccctgctcatctcccactgccatcccacaaagtgctcagagccactctacttcactccattaacttctaacaacacaaaatagagccccatccatcatctgcatccttcgtagatgatgacattcccttacttagccattatagatcaagtcaaatattcgtatgactgtaaaagtagcatgaaaatatcttctttggaaagctcttccaaattttttataaaaggaagtattcttgaaagttgactacacacttaattctattccctcactactgccccactcacagccattcccagcaacatatttggaaatcagtttctggaagtgtccttagagaacctttacaacctgttcctcttatactcacatcctgtgatttgaatttttgtttccttgtgataaaataaagtctagtttttttcattgtgttcacccaggtgtgtctacaaattacattttgctattaccctaaattaagcttatcttctaggaaaaaatactggccaccattgcaagtatttaaaagatgtgcaacagtggccacaggcaatccaaatgagaaattccaaatatgtttttcaaagaggaagcattattgagataaggggctagcctgccacttagttggatgtctaagatctgatatatttactaaaaaagcagttttcatatgtcataattaaaaacattaactggctaggcatagtggactcacacatgtaatcccagcactctgggaggccaagatgggcagaacacttgagcccaggagttagagaccaacctgggaaacatggcaaaactcttgtctctgcaaaaagtgcaaaaattagctgggcacctttagtcccaactgcttggaggctgaggtgggaggatcacttgagcatgggaggcaaaggttgcagtgagctgagatcgtgtcactgcactccaaactgggcaacagagcaagaccctgtctcaaaaaataaaataaaataaaagcactgactgacaattacataaataagaaagggtaaaaaatttacatactacaaacatgttcagttaaagatgcatgttagatttttataactggcccttctgcggctcagaagataaaatagttaaaagaatctagaaatagacaatggtgatggctagatgacagtgtgaatgcacttagtgccacttaagtgtgcacttaaaaatggtttagagggtaaactttaggttatgtatattttaccatgataaaaattttttttcgaaaaatggtgattgttctagttgaagcagggctggggcctgcccacacagagacactggtaactcagctgattaccaaggggacccaatcctgctcttcctagaacggaccggtctatccctttcctgtatattcagggctaaccagggatttcccctagagcttctttctttgccttactctgaggaaagcgtgtgggtttacaggaagaagtgcctgtgagtgctggtcgtggggtggggcctccggtcagcatgctctcccccggatgctctgagttctccactggtcctacctgaccttaggaatgacttccatcaatgtcccttatctctttgtctcagatctcaaggcccgagccctctatacccgccatgtcccacaataagacccttcaggtcattggccttctcagctctaacacatcttcccactcaggcccctaacaacttcagcacaggcaagctgtggggacccagggatgctctctctaacttctgcctgcctagctttgccattcagcaccgtatctctacctatggagggatctccttccggaattctaagcagcaagttgaaaaaagcccatttcttttcatatttctccaaaacctacttggctttttcaggtctcagccccaccacacctacatcccacgtcgtctatctttcccagccacattagaccaagggacaggaggtggttccttctcagaggcaaccaagccttgcctgcacactcaggccttgtgtgcttccagtctccactggaccgtctgcccctctcgtccctcgctgtggtctgtctgctccaggatcggtcatccaagccatggtgtagtgacacaaacttatctgtttcttttcctgtcaacaaaacatggcttttcaaatcaaacatgattttttcaggttgtcatactatgaacttaaaagccctcttgtgaatctcaaagcctagaaaaaaacttatttgatgctttgtgcccatttctccactcccaaagtaaagaagagctgccaggaaaataagcacaagagggatgtccaataatgatgatactttgggctaatattttcaaaaatattctcctctcctactctccaccatccacacaaatatatattcgaagaactgcaccccagtctgaaacttatggcctgcggagttgactatatgttccccagtctctgtccccttagaaatgccactttatttatttatttatttatttattgagatggagtctcactccgtcacccaggctggagtgaaatgtcatgatctcagctcactgcaacctccgcctcctgggttcaagtgattctcctgcctcgggctcccgagtagctgggattacaggcacgtcccaccatgcctgggtaatttttgtattatttttagtagagacagggtttcgccacgttggccaggctagtcttgaactcctgacctcaagtgatccatccacctcagcgtcccaaagtgctgggattccagacatgagccaccacacctggccagaaatgccactggagagcatcacccttgggagcactataaactcaattggggttgggggaagagaagcatatggtgtcgttcagcaatttggctcctaacatttctcttcaatttgccttgccagggaaaacctggtgccccagggcctccaggagttccaggggaaccggtgagttggcagttactttcatgacagttgtacttgtgttgtacttgcatgcagttttaaaacatttgttggcaattaatttgtgtctgtggatgtgtttatagggtgagagaggacctgttggagatataggtttccctggaccagaaggaccctcaggaaagccagtaagtacttcttactacttaaaatatgccacctagagaaatgctctaacattatctcctcatctaccacctcagaaattctgagatttgaataagcagtttccaaggagtaagaagaatgcacagatggatttttgatggcaagggcaggagttcttattgagttccctagatctgtgtgtggtatctttatgtcttaaacagtgttgaaaatggtgagagttttaagtgtcaggaaatctgactcatcatttcttaagcctaatgttctcaacagacttaaagaaaatataatggcctgtcatgtcctaaagtataaagaaaccaaagacttatagatataatacctgtatgttaaaccaaatcctaaagtagaagttattttctcaaatttcctcctttgtatacaggccttgttttcttacactttcataaatcactactggtgaatgtctcatccccttgtgtcctaaaagagctcttggttactgatctgtggtattgatgtgacattgtaacaatcattctgactaatccagttccacataaattcatctagtcactgctgtttgctaagaatgtgctgggcccttagggaggggatctaagatgaataagacagatctcactctcagagttatcctttacagaaggtcactgctgatttgtttgctgtggtgtgtatgggaaagaagtcgaggtgaacaaacagtgcaaaattcaggaagccagtttggcacctctgtgaaaccttcagggttggtggccaccatttcctcagagaagacatgaaaaaaatgtaatttagagtcaggaagatctgggtctgaattatggttgaaaggattttatgagtcacttaagtgccatgacatatggaaagcatttccagtgcctggctatgggaggtactcaataatattagtttcattccctgcctcctcttacctcctcattcccatcccctgcaaggcatatcattaaagcctgccactgagttcccaggagattatgcaaaaagcaatttgttcatcaccaaatatttcttgagcacctcctacatgctaggcactgttctaggtggtaacaactcatagcttttgcattctaatataggaaaacagataaaaacaacacacacacacacacacacacacagagtttcaagtagaagaaggtataagtagagtaaagctctggaatattattcaaatagtgggctcagagaaaatttgcctgcaatttgagcagaaacctgcataaagtgagaagtcaagccatgggaaggtcagaggaccattgtttcaggaaaaagaaatggctaggagagaagtgagcccgatggggtccaggacctcatcaaaaggcatgaagtcaagaatgaacgaagtgaaggaagagttggaaagatacggagggagatgtaggcagtggccagaccatgaagaacttccaagccagggaatgaagtttggatttcatttgaaatatgatggaaatccactggagcttttgtagcaaataatgaaaatgattgaacattttgaggatcactctgatattgtgtggagagtaggctgtagggagtggggtagaggaagacagaacagtaagaaaacatcaccatcatctccacgagaagtaatgacagtggaaacagccatgagtagaggaacttaggatgtacattgaagagagagccagcaagcaacaaaacttgctgatggactaatctagagaagtgtgagggaaagagaccaatcacagctgtggtgtagggtctgagcaactatgtgagagtgctgctgtttggtgaaatggggcagactgaaggtaggtggatttgggagggagagccaagagttctgtttgacatgttcatgatggagcactagcaggtattcaggtggagatgtcaagtacacagtggagacttaggagaggccaagattggtgagaccaattagggtatctaaacctgagcctggaaaagtggagtcactgtggataggaagggaagagagtgcttcaactgttaggaagacaacccaacaaagaaggctgtgaaactgcagccagagagacaggaagaaaatcgggcaagtgaggtttccttgatgtcaagtgaactgttttaagagaaaggagaaagcagtaaggagtgatcaacatacaggtaagtaatatgaggggtaataattctctactgcatcagaaacgtagaggtcattggtgggagagatcaccacatgttagtatcttggtaagaatgatccagttgagagaggaaaatttgatgacacaggagagtgaagactactttgagtagaactggtatactcacaagtgggaattggtcttaactaggaacaggggcagttcacccttcctaactgtggagtgtgggggtgccaaagttggggtgcaaatccatgaagattgacgcaactggtggagggatggtgagaggggtctcttttgtttgttagtgaaagaagaatggaggttgtccaagtgtgaggagtggggaggtgatgctgaagtttggaagagacaggaaaatgtgtgaaagagtacttttggagagatagaaagggagtcaaattgggaaatacagagggatggcctggtaatgctgagggtgctgcttgccatctgctgttgaacatttgggttggaacaagcgagcaaagatacgtggttttcttcagccaatcagctgctcagatgcagatgtgaggtaggcagaatgtacccaggaaaggggctctgccaggtgaatgagatgagggtagagaggagcaaatacatatgagttattgtaaaaatctctgaaagcagggctgccctgtggatagaaagtaacaccttcctatacaaaagagaacactgatgatagtctttgataaattactggagataaaaaacaggttatagggttacgtattttcttatattgttaccaaaaacatgaactacacttttactctagatttatcttctcttattcaagtgacacagctgtttctttcacatcctctcctaatcagctttatccttgttccttgtgtgtctgaatgtaataaattctttgaaccatacacttcaggtaacatgttcttatttaacgtactctcaataattcccaggatgtttcagaaaggttggcgaactatggttgggttgtcaactgtgacagatttcagcataatttatagcagtgaaaacacgcagttctttgcagttccatcccacagaatccattccagcacaataaaagtcccttgggcttttagaggagcaagtccatgcaattgcctgctggctaagaaatcatattcctcaccttgatcttcctcttcaaatcagatctctaaaacacacttgctgttgggccctgggtatttgatttgacctcgaatacttttccttcttatatctcccagccaatagttctctcagtcttataaatctttaagcaggactaggcttcgttatcacttctagaactcccttttaaagttcaagaaacttccagttttctaataaaaagtgactaatactgtcaaaaaccatgattatacatttcttgcttttctttcatatttccaactgaaaaataacaattgttctctgactgacactttatttcatagtaggatcatgctctggccatgttatgaaatttccccagcagcaactgagaccatttactgagaatgatactctgtgctggaaaacctgttagaaggtaacaaaaatgccatactccagccacctatgccatgaggcaccttcttatttctcaggatgacctaatagaagaataagaaaggaaaataatctttgttgactatttatagaggaccatgcatttttcatgttatttcacttaattcttagttttgaggttatttattttcctcactagtgaagagattgatgctattgaggttaagtaaattgcccaaaaaggttaatgggactagtaagtgacagtgtcagaatccgaactcaggactgtcagattctatttatttgttttccattttaccacctttctttaccaagctctcagtagaaatatgattaaggaactgtcctcgaaaccttatgcttttgttgtgtttaactatgttaatgcagagttagaaatattaatcctttttttctttatagggaataaatggaaaagatggaataccaggtgctcaggtatgggaaatatgatttaaaataaaagttataatgcatactgcatccagaatacctaccaacatttacatcaatcagactgatgaaaaatcttggcaaggagtgattttcatgttgacatctgtttttcagggcatcatgggtaagcctggagacagaggccccaaaggagaacgtgtatgtatattactattgtgattgttattcaagtctgtctgttacaactgtcccatcatttgagttacacaattatgtgtgtagacccctgcaaatcaccaaatctataaaggctagggtgtaggcgatcaaagatctctaccagacattaaatatgacaacggactcagagcaagttatatggtacatctatgtagttggcctttgtacacagccaagtatactttgctgtttaaatttgggaagcttttattatcctcctgtcttagacatatatctctactataaccatcacccatgttctttttatctagagtaaggtttctcaacctcagcactgtgattattcaggggcagataattgttgtggttggctgtttgggaattgtaaaatgcttagcagcatctctggccttcatccactagatgcagtagcgccaccatccctccaattgtgacaaccaaaagtgtctccagacatcaccaaatgtctcctgggaagcaaaatcactgcaattgagaactactgacatgcagaaaaactaagtagagtaaagaaggtggtgtgaggggttagagaaatggaaagtgtaactgaaagtatagtgaagttactagtaatgccaattatgttatatggttttgtgttgtttggagcgttaatgtcattattgcaatttctctttatttcctttaatgaacctcaacattttctagtagaattgatttctactagaattaacttctactagaattaatttccactagaattaatagaattaatttctagtagagtcatgccactgcaagaagttactcaaacattgttactcagtgtaattctattaagggttgctattgtatgtgagtgtgggcacatatgtttgtatactggtgtctagttcgctaacttttatttatcattatacaagtaatctataataactgaaggaaatgtgaaaatacagatgatgtaaatttaaaaggaaataaatctaccttaccccactacacagagataagcactgtgatatttgtacgtatttccatctctctcactctaatacataatatacacatatatttatatgtattaatataaacatatacttttccaaaaaggagcttatgctgtcttgtaagtgtcttttttcacctaacgatatatattgatcttttcttgtctgtaaatatagatctatatctaccttttaattgctatatgttattctactatttgaccataccttatttcacttacctagtccgctggacatttggattccttctagttgtcataataataaacatcactacaatgaacatctttgtacctaacttataaaataattttaatatgttaaagattgcatttatcttgcacatgatcagagtattaatcattgatcaaagtgtgctaatattttttcttgtcatctcagaaatttctccaaatgtgagctggagtgacagacctgtatgcagatatatttttataactaagacagtagcattgataccaggcctaagtgcttttatttctttctacatggcttatttccatatctgattctatgatcacacaaatctctgtaactgttcatttatttctgttaatttttaagtcaagagaaattgagtttgcccttctgcagagtagtcatagttaaaagaataatataatgagatacaggaccacttcaagcatcattccgtcatatttggtgtgaggatcacttcctggagttatgcaactgaatatttgaaaatttatgactgaagcaactgccatgatctctctctctctctctctctcattctctcttgcacaaacacatacagtagtagacacattccaggataaaaaacagcatcaagcaaacttcatatcacatttaggcacatctaatataatattttactaattaattatgacatcttattcaactgattcttgtttttttgttttgttttgttttgagacagagtttctctcttgttgcccaggctagagtgcaatggtgtgatctcaactcaccgcaacctccgcctcccgggttcaagcgattctcctgcctcagcctcctgagtagctgggattacaggcatgtgccaccacgcctggctaatttttttgtatttttagtagagacagggtttctccatgttggtcaggctggtctcgaactcctgacctcaggtgatctgcccacctcggcctcccaaagtgctgtgattacaggcgtgagccaccgcgcctggcccaactgattcttccatagttcatttatactattgagtaaatgatgtcagtgacatcctccccccagtcacctgctttgatcttttcaatggttctcccttctcaccatcccgtgggtatatatttagggcacagtgatcacactcaacgtgcacacacacatgcatacacgtgtaaagcacaaatacagaaaacaaacctgaagagtctaataaagcacaaacaaacaggggaaagccaggggtggggagagcacatgatttaggagagattttgaatgtcctaaagtttttttaagtgaaaagtctcagtaatgagatccaggggaaagccaggggtggggagagcacatgatttaggagagattttgaatgtcctaaagtttttttaagtgaaaagtctcagtaatgagatccaggggaaagccaggggtggggagagcacatgatttaggagagattttgaatgtcctaaagtttttttaagtgaaaagtctcagtaatgagatcctcttggcaatcttcctttatcattgcaaaggagacccagacctcaagtgacagctggtattgactcaaaactgccatcatcctagatgggcaaccaagcacacctaacattctctctatcttttatgtattaagtactgccaaggtgccaggcattgctctgagcactttacttgggttaattcatttagttctgaaaatcgccctatctaatggatactattaatatgcccactttgtaggagaggaggctaggacacagagagtttaagttatttatacaaggcccaacagctaataagtgccagtatgaatccagaacttttgctctcaactacagctgatgctagaagagattattctttgttattattttttccttaacagggtgatcaggggattccaggagacagaggctcacaaggtgaacggggaaaaccaggccttacaggcatgaagggggccatcggtcctatgggtccaccaggaaacaagggctccatgggatcccctggccaccaaggccctccaggctctccaggcatccctggcattccggtaagtagtgctaagacgctttagggctcctggcttgtaccgaccatgtatcccttttacaatgaaagcaatgatactgcctttcaaataaataaaacaaacctaaactggtccccgtgagggcaataatagctgtcatttaaagttatgtgccagatcctctactaagcacttactatacattacctcatttgatcttcacaatcattctggaaggattggtgtccttttcagcccagttttataaacgcataaaatgagcattaacttgcccaaggtcacagatttattaagtgggtcagacccaggtctggatggcttcaaacccacgcttttaacatacaggtactgtctctaatgtctccttacactacacagaaaccacatatgcctgtttcatattgctatgaaacatgtccatttcatactctattttgttgaatatcagaacaacaaatctgccatgagtagtgccttgaagtagaaaccacttaggccaagagtgtttagtaaaggaagcccatatctttattaatcctcaagaggagtggtgagtggctattctgcagagaaatttaatctgaaaatatccatgttaggaagaaaggagggtcttgaagtgaagtagggcagttaaagacacattctcctcagataatcaaccaataccagatataaagcaaaactgagcattcatgcaattttcatacttctatatttctgcccactgtcctgaaactctacttgaataaagcctgtgtaacttcactcttggggttgtgtcagtaattggtattagttgcattaattaaagttcattaatgaaatagagcattcttggaattattctgtcctaccggaatcatcactttataagcccatcatattggattttttttatttttattttttgtcattctaagtcagtttgttgttacaaatgaactagcaccattatgttaggaaaccccacaacaatactattatcacatatctacacacagacaggatagaggaattttcagtgaagagcgatgaggaacctacccaagaatgtttataataaattaaggctcactatctaagtaggctctgcttcattcttaaattcacattgcatggtgattttccgtagagcttccaactctctcatctgaccatcttctgttatggtctttgttcatgtttatatctcagagtggggcttattgcctttgtcacaaccgccaatcttcatcatattgtctttaatgccacacatatacccctggataataatcaccaactataaagagtagtaaaatactttgaaattctaaccatcaagaaaaaaataatagctcctttaaaaatatcaaggcactataataaaacattactgttataaatgttaaattctttgtcaaatgcatgtggatttacttgtcaacaggtggaaaattcagctgacattatttgcctgcttccttttaccagatcccaattaagaaaagaaaattacttaatacctatatacttgcaatgtgtaaattacagaataaactttatgatgaaatgggtaaaacttgcttttatcccatgaatacaacattttttaaaataatccagcatacttggagttctgttccaggttgtcttcctttgaaaatacattatatcaattagatattgactttgccatccagggattggttaaaagttaaattgtgattaggctactaacatcatgtttatactttttagattatttaaccttataaaatgaagtcataggaatgtcttccctaactgtataaagccatgtgtctccatttaatgggaaacctgttgataccactggttatgatcccagcccatagcttttaaagcaattacacacttcaacttcttcccagaatttggtcaaagcaacagatatttattgcccaatataatcaattgccaaaagcatttttcttgataaatgcatccctacagaagtttcaaataggcaagccaacccaatatttctattctttattcatttgtgctatgctctattttaacaacctttttttttccttcttcaggctgatgcagtttcatttgaagaaataaagaagtatattaatcaagaggtcctaaggatttttgaaggttagattttcttaataacattttcgaatttttcactgattcccacctcccacctactatggggaatccctccagcaacattctcgaaagatggccatgccacaaaaaccttaaggggcagcccattttatgatgggacagctctttgatgaaaattcttctttatacaaagttaacttttgcctccctggaacttcctttcattatacctggtctgtaaaacaacacaggtaaagtacctgcttgtactcacatgacagccctttgagtatttttcaatatccctcatactcctccttagttttctcttttatggagtaaatgtgtctagctcctccactattatcacccctgggaaatgtttaatttataaatgactctcatttaccaaggaatattttgaccaatgcagagtagtgtctttttatttagaccaaagtcagcaaactgtaccccctagccaaagctattgccacctgctttgtacagcctacaaactgagaatggtttttgctttttggtagggagcagtgggagcgagttatatttttaaacggtttttaaaaatcaaaagatatttcatgatatgtgaaaattatctgaaatttgaatttgtttccataaataaagtatgcacattccttcgcctcttttctctggctgttatcccactacagcaacaggactgagcaattgtgacaatatggtacataaaggcttaaatattttctatctggcccttgcagagaaagttctgacccctgctctagatacttcaataattcatcctaagatgtattgctttttggaaaaaagcatccatattattctgttgattcattacgagttttcagttaactaacagccctggatcttccttataaaaatatttttaaatgaggtgtttctcattatggactgtgtgtttattttttgaatctaagtgtgtgatcttatgtttcctcttattaatttcaaatcatttgtgttcatatcttgttccaacctgaagatgtcttttgaaatgttgtctcttgaagagcaggttggctgaccctataactttgtgtcatgctaaatttcataagcatgtcatcattctagctgttgatagaaatgttgactaaaaaagccaagagtcaaggattaggtctttccaaatgccatgggattctttctgtccacttgtaaatcatcttctaatctattgtttagtgagctctgaatccatttcattgtcctaaaactcaccctacatttctttgtctatttgcaaggaattgacagtatcacatgattttgacaaatggtttgctaaaatcaagattactcttctgaactgtaagatttaacaaatgaatccatgttggttctcatggttcctacttcctttgcttagcatccataagccaaaaatagattgttgaatttttttaaggaataagattataagatgccccaagtcgatcttgactccattgcttcaaacacggactcaggtcttctccaaggagtcttgattattttaaataataattagcagtagagactgaaatcttggtgcttggatgcacattatcttactttatatgagaactagaaatacagtagagtaacactgggacttgtagctactttaatgacaaaacagaaaaaaatggggttttttgttgttgttgtttggttggttggttggtttctgaggagtctcatctgtcacccaggctggagtgcaatgacgcgatctcagcccacagcaacctctgcctcctgggttcaagcgattctcctgcctcagcctccagagtagctgggattacaggcacccaccaccaaacccagctaatttttgtatttttagtagagacggggtttcaccatgttggcaaaaaatgtttttttaaaggtcgtgaatttatgctgttgattttaatttaccttgatcttcactaagtatctttatcttgctctgatatgacagtttactaatacatttgtccactcttttgttgagctaccagtaattttaatgttgcccttaaattttgaggtcttttctttcattctctttcattctttcttcttctttctttctttatttctctctctctctttctttctttgttttttttgacccttgaatcaaacattgtggactagactctaaactttgctttccaaacactcatttccccgtcaggaagtttgaaaaaaaggcaactgtttgaaaaaagacatctcaagctcttcaggggaatactgaagaatatacccatggctacataatttgcggtgttcagtgcacagtgaaaatgctggcacacttgttaaaaaatgattaagaattttaagacagcaatagtaaagccgtaaactaaacatggggccctatgtgactgcataggtagcccggacatgctagtcctggggacaggacatctagaatctcagatagtatccatgcatttagttgacctcaaccatgaaaagagaaatgccagcgtatgtgtatttttgaattgcaatctaaagttttcctttaactcttaatccctatgggctgtagtgtctttatttatcttttatctaagagagctttaatactgaacttcagtctcttaagaggctttagataaaatcatatatttaatagtcagtaattaacccatctttttggaagctgattaagaatgtcagaaaatataaccaagcattttcagaaaaaaaaaaaagtgacatgttgagatatagaaggtgttcgttttacaagtccatcagacactggatgaaggtgtggcccctggcagcctgccctgtgcattcagcaaaagagacacttctactccctcctggggaaggctccgtcctgcccactcccaggccattctgtggctactctcatgaagggctatcagtcttcagaggaggcaggtcaggggagttgggccactctccatctgtgttggggcaggctcaccagacttctgctttctgagaagctcctcctctgggtctggatccttcctctctgagttcctgcccctccttcctctgtcacagcccacctgcctggaagctgacaggtgcagagtcctccccaggtctctggcttcacacccatctctcttactgcgtctctgtctcttccagcctggccaggtccaggtgagtggctggacccccaccagagccagtactccctcagaaaccacaggtgtcttagccttaagacaatattttaaagcgacccataaggaaactattttctgagacttctaaactctaagactccatgtgtgatagccctttccttttgtctctcttgacactagtccagcaaaactgtcttctcccaaacaaaactgtgcctgaaacccagaatttagttatttagcatttaagttaatttgtcccaagatcatttcaattcactccatttaattttccacttagaaatcactttttccatggcttctgaacaccatttacaaaaaagaaaaaagaaaactccattttcacaaatcataaagctccaaggtcacaattaccattttcggaaagttttttctctaaaagcaaagattaattttcacatgttaaaacagttacagttaagtagtacagacagctaactgctacagttaagtagcacccgtctccttctctttttcttagtggtttcacaagagacagtgtcaataacagctaatgctatctctgctgcacgcatccctgcacatctgcagcctcgagagccattgtctccgagcggcaagtcgcagactgtcagcagggactcgaaggagtccttggaagatcctgctctccaactttatcatcccaagtgtccagattacaccctctagtgaaaccctagaccaggatgacccaaactttgggctctcctcttgtggctttttaacccctttggggcttcccaggtgacccacctggtgatacaataccctacaaatctcaaaccttgatctattttccaggccacctaacctcccttcaacatcctggtgccccttcccaaacctaactgtggtggaaagaggtgtcttttcaccaatcccaagtctaggttccagattgatcactatgcacaaatatatatcctctctgaagttcaattaaattcccaatttgattgtccaacaagtcaagtccttttgctagtaaagtgaccacacaggacaaggacagatgccatccatgtgtctcagcttagcatttggctttagaagggcttcccagctgccagtgatgctgcccacacaaatgaggctcttgccagatctgagaagtttaattcttgctattacactgtcctattatgcttgggaatttacatcaacatgcaggaagaatttaccaacctttgcagaaatgtgtactaacatctggctctctaagttcttgagtcaaacatgggaccaataagcccacacctccagctgtgggagaaaagaaagatttgggctaagtattcccgaacaatgtttctgcctccagatttccagtgttcagaaaatccccttacctatgttttctcgatatgcatttcatacatatatttcatatatatatatgcatatatatatgaatgtgtgtaaatatgtatgatcctattttcttatcccaaagttgtaacatcttttcttacctctctacaactaagatattaatttttatgtatgtatatatgtacttgttatatacacttcatctgataaatatacatcattgatgatatatatatatatatatatatatataaagagttaaaaaatatattttccaccacatagtctctgtttcttccaatttgcttctttctgtttttttggttgcaactctgttgttcagtttgtaggatttcctcagtgtccagtaatccttggctgtctgcatacataagagcagggttttaaaaaccgattgaaagttgtgagcgaacagtggggcttgccaacctcgagtttcacttagggtagtccagatgggctttttaagtgagggacccttaatttcagtgtctttaagtctttactctcagtctggtcagattctccagtggagacattccatttcctgcctggctgtgagcttagctacttcagattttcagtttggaagcctgagtctcaatggagtctgggctcctccatgcagaggcagactacttacccttttaagataataataaaccctcagtcttttgctagggatggggagaggcacctgcctagctgtatagagaaaggaatttcaacaactactaaaacaggctttcaatcagtgctccttattttagttcccctctttcacccccacttccagaggtaacttgtactgccaattctgagccttctgaggattttgtagtttaggtcaagttattcctctacttctagtctaagagtttagttttcttgcatttgttaagtaatgtatcactcaaccgtctggttcttaacttccaaaattgtgctgctattgtctcctttcatatgctcccccattcttgtctgtttaggcctttaggaggattgttttgctaggattcaggaggtagttaaagcagatccatgtgtttaatccgccatctttacccatgatagttcaaagcaacatactcattaaggtggcaaatgattgagacagagacaagtgaagtagtaaccacctttgggtcataatgaaccacaaaataaatatgaatccaccaaatgatgctgttgaattaacagtgaaaaatgaaactagaatataattattaaaatatcacaggaaattactcttctgatatttttgccctttaggagagaactatatttaattttggtttccacatttaggagacatttatggaaaagccctgaaataatggaaccaaaaggagatttacaaaatagattgtgaagcctatgagtaaaagttatttaacctgaatgctaatatgtaacaatatgactgatttcccaagggaaatactcattaactgctctctgtttccataatggggtagcaaaataaaataaattgaagttataccaagaaaatggataattagacatttccatgggcattaggaggagaagaatttctgtctttgaaatatttacaaattttgtctgtgaaatagaagatagacatgggccagatgacatgtgtgtgttccttccttctctaaaatacgtagtttatcatcatattaatattaatgtctgtattatattaaggagcccattctccaaggaagccaagccttggtctcatttgttagagtgactgctgtggctttgccttggcagatggaaaatgtgtgtttggtttatgcatgcttatatcggaactcttcaattcctgcctcattagaaagcatagccaaaaacattttaattgactgaagatccctgaaaacagaggaaaagcaattaagaataaaggcctttacaattcatctggatgctctgaaacatattattgtaaattatagagcattagggtagggttcagaagaggtaattacccttatgctaaatgactgtttctgagtgtatttcaaagccagataatttacagctagaagtagtgaaaataattatctgttttgctaaaaatattaaaaaccaccaaagtacttctaaactcaattcatatattaaagaggaaaaattagtactgtgaatatttgtgtttcgacattgaaggtatttaaacagacatgtttcaaattaagaaaaattgtgaccggtctcagtggctcacgcctgtaatcccagcactttgagaggctgaggtgggtggatcacgaggtcaggagatcgagaccattctggctgacacggtgaaaccctgtctctactaaagatacaaaaaaaaattagccgggcatggtggtgggcgcctgtagtcccagctactcgggaggctgaggcaggagaatggcgtgaacccgggagacggaggttgcagtgagctgagatcacgccactgcactccagcctgggtgacagagtgagactctatctcaaaaaagaaaaaagaaagaaaaattgtactgaaacacatctcttctttgaggtgcagaacagcaaatattcaaactgtgattattgaatttcatatttattgtaatgccccaagttcataatttgatgtaataaagatattatatgtacattcagtatgatgatttgtaaaactaaaactatatattaattacctatttgttttatctattaattactagaataagatatagtaatatcaaccacacatcccaggtagatagtgaggtagtgatactcgagggcaggtgatttcatatcactccttgggaccagcatccattagatccctgttggcctcccattcatccttcagtctgcagccagagattctagtcctgtgcgggttgtggtatatttccattctgcatgctttgtgacatgagaatgtgaatgtaggtgattacttttcggataatgtcagctaatgctctatagctattggggcttttctcttaataattctatatgaaaaaacaattgtttttctttcttaaccagtatgggcctacattgtttttaaatgattgttttaattgaaaactcatgggaaaacagattttcctcagaagtaatttactctttatttaaaaatttacataaaataaaagatacatatctgtttaagtatgcctttgcaattcaactaaatcaactaaactgaatgaaaagactggagaacatggaagtaactctttacaagacctatatcatttgggctttgtgttttctaactgacggctatcgtttctactgcgttgttgtctgtcatttggtctttacttacaaaataaatactaatttcctcagtaaaaaaaacttttctggaagatttgtctgcaccaaacccagactaaagtttttaaattgaatatttatttcttactacacaaaagtgtctttgaaaaattgtgtgtaaattattttaaaataaaaccatttaaattactaagagatttttgaagaagttatgcaaaaagaaaaagaaaaaacaatgcgattaacttcttgtcatggcaaggatagagcctcctcaggttttctgtttgaaatctagttgttcatatattagattttttaaatgtgaggtatactaaatataaacaaaccaagcaattttaagaaagactccagtgatagattgtatttataatggccttggaatgagttaatgattttaccaaaattaatttcatatagtagtaaaatattcgatatgctttttttagttatctgttgctgcataagaaaatacctccaaactttagtggcttaaaacatttatcttacatttcacattataaatgtttattatctcacattttttatgggtcagggacttgaagtgttgcttaattgtatggatctggctcaggatctctaatgaagttgcagtcaggatgtcattcagagctgcagtcatttgaaggcttgactagggctggatgatctgcttccaagttcatgtgcgtggccactggcaggtagcatcagttcttccccacatgggcctctccacaggacttcttgggtgacctcactccatgtcaactgccttcctccaatgagtgatctaagagagaaagcaactaggaagccacgatgtcttttatgacctcatctctctagttgcccactgttaattcagcctttttcttttcactagaaatgaaaagtctagcccccattcaaaactaggagaattaaactccaactttggaagacagtgtcaaagaattcatgaatatattttaaatcaccacacatacgttcacaacattcctggaaagtgccttaaagttattatgaaatcattttttaatgtgaacctaaactctctccacatgccattaccagaggttagattccatgctagtgttctgtccactagattgttacatctcagaagcactgaaaattctcagactttctgagtgacacagctggtctgcatctatacacaaacaactttgcaatcgatattatttgtctaatcaaaaaactcagcagtcagaccagttggtaaattagatgtgcttaaattaaaaactaaatctttttgtttgtttgatttcatgtattttgaaattttttgacataaaatatttctgttctatgatatattattttttcttctatacatgaagagaggatggctgtattcctatcccagctcaagctgccagcagcaatgttggctgcccaagcttatgggagacctgggccaccagggaaggatgggttgcctgggccaccaggagaccctggaccccaaggtaagtcttcaagtgtaatattggcttattgatttttaactctctgtatttataacatgttagtcacagttaaggaaaaaagtatgtatgtatgtcctttatttatacattacatatataaatatatgcaatatataaaatggtttcatatgtaatctctttataatatttgacattctagaagtagatgtttaactattactacttcaaatttaaaaccaaatgagagttacctggtattctaaatgtattgtaaaaataatatttattataacaataacagcaataatgtgtgcttatatatcattattatctaggaatcttagaattttttaggcttccccttttggtgtaagttaagcaagtctccatcatctgagtgtcttaaataaactggagaaagagttttaggtgactcaacgacaaatagttatttggttctaaaatatatttttaagaaattttagaatctttctgctttgaatacagcttgtggatggtaacttgaatgttaaagaatttttcacatgatttctaaagttcttaaaacccaacttatattggcaaagaattttgttccacttatgacaacttgacgagagacataatcttaagtatagcttaactaaattaatctgacaaggccatttgctagaaatatgattagcaatccagcaaagtggccaaataggcccaggcttagaagagtcaacaactctgaaagggaaatattaaattcagtgaatatatatcatgaaagataagaccaggaaaactgcttcttattgttaaccatggaggatctcaggttccttccttgaaataatcaaaagcaacttgtataaagaaagaaaagtggaaattaacactaaaattaaataagaatgcagtccaaaataatatatatgcaaagaagtgtttttctgtcaccagtttccttcctactgctattctgtaatattgagcctcattttctgaagtgtcccaaggtgactgatgtgcccttcctcttctgaaagagcaacatctgttcagttcccaatagcagtgcctgttagtatatatatcttaatataaccttataacctatgaccatgattgccaagtctttgcgtttaattagcacaatataaaacaggaacagttaaaatctctctagttttttttaaacgatacatatattccaccattatctttagattatagtgaagtttggcagattgatgaaggaaagagaaaagtataggatgagaagtagccctctatgtatacactattgtgtagagggggctaattattatctttcgctggttgggtctattctgaagtcagagtatatgagactggcatgcagatctcaaaagcttatctgaaaatgtgtaatgcctcaagccacgtgaagaataagcagcgttaacaccaataggaagaaaactttggatagatccttcaaacagtggtggtttgagaagacaagaacaatggaaaattgagatgatcaaggaaaacagctctggaactggggtctcctgttccactcaaacacctggcttcagacacctcacaggtgctgcgaaggcccatttggaaggctgtcagtcagaggcaattctaaacccacagtgtcagtgaagcttttggaaacaagccttctgttcaccactccacttgcccttccttttgcaaaggatttctatggatttcatctgctcttgtgcctcaaagatattatagactacttctactcctgatagggcttctggatgcaattcttaaacttggaagatatccccacatgatttccagtttttttgtgaaccaaggtttactaaaattgtcaaaacttttgtctccccattgggtttctgacaacagacatatcttgactacaacttagtatatgtctccttaacctttacataatactttcttttcagtatttgttaaatttgcctaaaatttagcaaaaaataaataaaaattgcaaaacatagaattcatttttaaggaatatgtgtttcttaaaaatatttgtttttaaggaatatcagtacagtaggcatgctgtactgataatcctgcctaaaggcacagagaaatctcactgaaaagaaagaaaatgagaggctgctgtttaatttttggtgcctctagagaagtgcacaggaaattgaagtgtttttctctagtacataaataggtgtgacatgctcagaagatgaagttatacatgtaacttataagctttgctctgctcaatttaagtgtttttttccaaaaaggaaagaaaaaaatgcatttaaaatcaccagtgaccacgcaaacctcggatgctgttgtctgaattagtcctcttaatgacacagcatgactgagtttaagaaagggttgaagtcagaaatgcaacataggttgggaagaaaagatggcttctgaatgtgacacagtgtgttctgccactcattcatcctgtctgatggtggctcctctgaaatttctagatgagacattttgttttgttttgttttgttttcagtgtttgtcaggaaagaaatccatttggttctgaaatacatttttaagaaattttagaacctttctgctaatagagcttgtggatggtaacttttgaactttaaataatttttcttatgttttctaaagtttttaaaaccaaaagttgcttatattggcaaaaaactttgttccacttaggacaatttgacgatatatatcatcttaaatattgcttaactaaattaatctgaaatgtaaaattaaaattaaatggttggtttgaaatgtgcactatggaatgagtcctttattatctttaggaaaggacaaaagtataaaggggtttcataaggtttcctgtgcttattctgagaagccggagacgtatagaaagcagtgagaaaatcgacgtcagactgtgagaggtacacaattcatattgaaaaaaggaagagccgctcctaccaagattctgatcatgaaagcttgaggatccgccttcagcaccctgaccttcttaaagtgaaaagaaagaccttttggattctgagttgcatcacttcatttgcagtttttctaatgtttccaaaggggtgattgtcgatgtcttttttaaattgaaaacatttccagacagcttttagattttagccgtcccatggggttctgagtattggcttcctgctgtgccttgagagaactttccttggtgtccattcccacctggggcttgcagcacagggcctcatggctggttctcccgggtatgagctaaaatgtgccacatcagaataaaagaaaccccaagaagcatgattcagctgagttcccctatataaacaggagaggcaaattttcctaacagacgttattctttcgagtgagttttatgagaaaacacttcatttaaacttcttctcaaacacagctgattctccatcacctattccacccgaggaatagataccacacctaaagccctactcatttcagaaggaaactcacatgtggggtcagtaggaaaaaacagctacatccatcgcatgcaccctgcatcagttccaaaaggacagtagtgggaatagttgttcttacttgtgcacttttaaagtaattgatcatacatactgtttgtaggaagcacttgtgatgtatagatttgacctttcaaatttagtagcattaggggcatttggatatgggaggacatgtgtgtgtgtgtcaaaatgactgaagggcactgctatcaattggtggagtagaaccagggaggctaaacaacttgtaaggcacgaggcaacccctaaccccacccccaccatgcccaccgtaaacaactatccctcctaaaatgccaatagcatccatttactggcctttttccggtatgtatacaggcgcacagatttacaactttagaagtaaatctctggagtcaaaactgaaatcttcctactggaaataaacacagtctaccacctgaaaaactacaccaagcaccaggtttcatcaatgactagtacctctagatgctttcaattaggacactgctggtgttttatttgttttcctacatgagctgcagttttatcaagctgtcatcctgtagaattttttttttttgagccggattttcactcttgttgcctaggctggagtgcaatggccataatcttggctcactgcaacctccgcctcctgggttcaagcaattctcctgcctcagcctcccaagtagctgggattacaggtgcccaccaccatgcccagctaatttttgtatttttagtagagatagggtttcaccatgttggccaggctggtcttgaactcctgacctcaggtgatccacccatcttggcctcccaaagtcctgggattgcaggtgtgagccactgtgccttgcccatcctgtagacttatcgtatatggaaatacatgtctctttgcagatagaccagcctcttccaaatttaaagacaggtccacgctgaagaggtgaaaagcttaattctataaatggggaaagctgttattgaccttgttagcattcctacaaggagttttgttatgaagtaatgataaaaaagaaaaaaaaccctacggctttatggcagccttcataatgaatgagcttgggaccttaataggaaattcaagagtagaaagtacttgtgcaattcagtcgctttatctattaataacaggtaattattaacctaatgaactgagaaatttgtacatggaaattgttacatttgacaggagaagggtaaatgttaccttatgcaaatacacgaatcacagtttcttaatttgtaataccacatgaaccgaaatgcatgcagaataatatatttctgcattatattgcaaatctgagagctgaacttaaatgaaatcgctaagttttagccaatatattcttcatttggaattgcgttacactcttgttaatcctcttattaatcaaaagttcatgtatcttcagttattattcttcctcatatttttagcctgtaatcttaagtacttaccgagatagctgaggatcaactttataacttttctgtaatagtgggacctgagttaaactatcaaatatacctcaggaaataaatattattttactccagaaatgtttaagtaatggatttgggagggtggtttcaaatgaccctaagtatatacatttttttcctgctgttcacatacgttaaatgaaagtcacctatatcaaagaaatcctggaaacattttaaatttcaatatagatcaactatggttattatgtcacatgtcaaagccactgttctctctagggtctaggattgtactgaatatctttaacacaattttcaaatataaatatgtgaaggtttcctgctggtgggtgtatttctactatatacttcaaaatatttttaacatatattcttttttccactagtttcacatttatgatcaggtcttacataaaaagcaaataaatacctgtgtggtgattacattgccaatgttgttcagataataatgtgtacattgtatgacctagtcaaagtgaaaatgataacccctgctatctaaaaactgctatctaattctcaacaataatgggaaataattgatcatacatactgttcatagggagcattacattttctcctcctgccatgttctactgtaacagcacacctttatgaaaaggcacaactaaatcacagcctactgtttcctactgagatgctctcctactgatatctttgctgtgtgtccacatgagtctgcatggctgctctgtccatttaggacaaggagtgatctttaaggggctgtttaagtatgaaaaagttggaaataaaaactctatttgccatcactgtgaaactcttacagcatggaaccttttattcaaacaaagtattacatgggtgccaatatataaaatgcagataaaaatgctttatgctttttataagcagggataatgacttccagagacacaaatttctctgtactcttgtagctcagccaatagcaagcatattagatagtaagaataattttgttttaaaatatagacagatcttagacctaattcattttggttaaaatatcttaagttgatgaagtacatttgggagactgtcagtctcctctcttgtttcctagctttgctgaagctcctttggagttatacactgccatgttcaaacatggggtggatgtttaaacgttacttagagaagatataatgtttatagttgatcatttgaacacagacctgactttttagatgagttaacccacatatactcatgctcttgctatcatttattagaatcttgaattatttgttcctttcatttcctttaattcttggaataagatccgtattcctattatattatcttgttctcattttaagcaagactctttccatatacttctttcatttagcctataccttgccttcaatcagaattcctactgaagagggctcacacagcttgtcatagctatttgcaagattgatttatttaggtgtcattttcagagccaaaatctcgctatcaagagtataactagttggggctgggcatggtggctcatgcttgtaatcccagcattttgggatgccaaggcgggcagatcacctgaggtcaggagttcgagactagcctggccaacatggcaaaaccctgcctccactaaaaatacaaaaaaaatagccaggagtggtggttgagtgcttgtaattccagctactcaggaggctgaggcaggaggatcacttgaacacaggaggtggaggttgcagtgagccaagataatagtgccactgcactccagcctgagtgacagagcaggactctgtctcaaaaaaaaaaaaaaaaaaaaagtttgactagttggaactttttatagtaattgcatgttttttaagatcctcattgccctattatacccaatctgtttgatatgtaagtttaatatgtggttaatgcaaaacagttagctaatatactatttattttaagcaaatgtatcacataattatcacagactcagaaaatggttcttctctgtgctgtgttgccatagaaccctttttgtgtgtctcttttttatatatttctcacttaggctacagaggacagaagggagaaagaggtgaacctggaattgggctgccagggagtccaggtcttcctgggacttcaggtaagtgggatattgtcttcacaacacaagcaagcctttacaaattagaaccatgcttctcccctagggtccttatatgtcaagtcgagtgatccatgttggctagagggtgggagagaggaagggccatatgtgatctgcattgtaattttttttttatgtcgttagctctgggtttgccaggctcaccaggtgccccaggcccacagggccccccaggacccagtggaagatgtaacccagaagattgcctctatcctgtgtctcatgcccatcagcgcacaggtgggaattgaacacacctgaagaagacttggttcctggtaacatttccttgccactggagctctcttaataccgtcaaaccctcatcatctgtgggttgctttttttttttttttttttttttgggagtaagccaggcattaaaagcaaccgtttgaatcctattcctatagcaattgcaaatcagcattttttgatttttcccaaattcattccatatgttttgctttacaattgctatgatttttactcagagttttatatgaaatatgcaagtaaatcttatcgttagttcttcttcaaaaggaaattgcatcttgtgacttagtagactgatgatgatatccattttgtagactcatcaacatgtggttggcctttgatttctgaattttaaagtttcagacttatcttttccttggtgtttaaatttactatcattgctaaacatctcgtcaacttttttgatatagtgcattgctcctgttgaatgttttttgactactttttataacttaagaatttttataccatctacatctatcctacttatgcagaaaaataggcaataagaacttcattttacaatttatgttttcaaaaaaaaaatgcaggaaactgttttatcagggagcccaaacacccagcatagccaactactgaaatgattttgttaattctgtataatgagctcaattcaaagcaatcaccactggcatgaataagtactgcatgaaaagggagtatcaaattccagttttgtatgagttctgcaaaaaaagcctaatattctgtggtcccctcactcagtctctcatttggtaaacagaaagctgttttccctacaaggtgcttggtggtgaagccaccaagctgtctttggtactcttaaagcttcagtggcctagcaagatctttgggcccttgtatccattatccttatgacctcatcaccctcagactttaagacaagaagccaccatcaaaacaaaggatgggatacgtatagaatggactcacttgtcctagaagatgaatgtgtagtgtcagcaaatgcatgttaagaaggtgaagcccaaaagctcttaaggagaattgtatttctccagaagctgcagcaagaggtacagctcaacaaaggaaaaccacaggactggatatgcaactagtgctcagaccaaagagttcacacccactctaaaaccatgtcctctgaaaagaaacaaaaatacagtgatcatcaaatgcctaaacagtctttctgttggttagctgtacattcattgaggaactgttgattggcaggcactgattctctagaacactgggcatgaggatgttgcagaaatctagatggtgggtcccacagatgtgagaacatgctgcaagagcctgccagccacagcaatcaggactcacagctcttcaaggagcagtgcagatttcaatttggctaaaacaggatgattgcttttgtctgtttactgaaaaatgagtttagaaaggctagcccactgacattggaaaaagctgtgaacagagttgtgtctgaggaatgtgcctaatttaaggcagggtttgttccaatgcatccgtgatttgaaccggttttcattatagattaatgaactgctggtcaggtactgtctacaatggctgtgcatacctataacattttaggtatttcatattgaattatgctgtatatttcaattccaagtttatttattttccaaggttattttatttattgtaagcattttgacattgattttttttttttcgttttctttcttgtgcaatacctacaatggtgctgtgttttaaacttacacaattgggacatacgtatgtgttttcttagtaaaatggtaatttatcccgaaaaagtgtacatagatctaaaatttggtgctatgtgtatatcttgagcttttaatttgttgaattttctaaacgcttacaacttatctgccactcatattaatttacttgaatttgtcataaagctaaatattttatatgttttcaaagattattttttcatattaataggttgtttatctttttgcctgtttgctaatttaaaaatatttattttatcattttaatgttttcatggacttttttgctgatggtaatcaactttttttgttttttggtttttgagttgttcttgtcatagacataaaaagacaattcattttcttgttttattaactctgttcatttttattctacaaaatatgtcatgcattctttcttatgaattgtatatttagaaatctttctaaataccattaaggcttgactggttaattcctatttcaaggatttggatttattcaggtaatttgatgggatggggaaatataatattgtgtgatgcatattacaaagtggacttgtcacaatgacacaaactcattttttgtaactgggaaatatgactaaatttgacgtaactagagaaacaaggctgtatccacatggtacaagcctttctcaccctactctattatttaccttcagatactttttcctgcctcagctctgtacacatgatatgcaacaaagggcagcaagaaatgctgggtccacctaatttaacacaaaatgaagttgagattcggcagttgcccaattcctttaataaaaagaaactaaataatttgggccccaaagtagggtgggaagttttcctctaaatgacttgatggttgccaaatcccttgcaccattttattccattccaaaacatgtgtttatttccacatagatgttaatgatgttcaaagcaggggagaagaattattcaatttcatgaataactcttgtttgcactccagaaaacaacatacatgtttaaatacaaaataattatgggccatgacgacgattaatattaaaactgtgatttccatatacaagtatgtttgagttccaatcttacattttataccaagttcaaaacactttcagatagaagtctttctatgcaaagattaaagtatgacttcaattcatatttatggcctttggaatccaaagaaaaacagaagaataattcatggatttgttcattgttctttccaactgaaggcagtaaccattacttctaaccgtaacacaaacacagcaagttttaaccttttaaacttttcactttgtgagcaaagtaaccccataagtttatttccctatttcatggtattgtttaaactttaaaattttagtcacttaaagaacttaagcaattatattaaaatacgttgtctgtgaaaattatcatttgatatttggcttataaagtaatttttatgaatctgttttatgagttaggtaagatttagcctttctgcagtctgtctcatctgttgggaacctgtgatatacctccatttgtccacaagatggtgtttaaaacaatttgttcagaagaactgagcaaactaacagaaatacaaggctacgaacagtttagtggacaactaaatcagactcttgcctttgcacttttttttaacttttgtagataatttttgttaatttgttttgttaatttatgtttttcctaattttaagcatctttatgaaacaggcacagtaccctttggtttgttgactgttttgattttatttctttggtggatatatatgtacttatacacttagttaacatgcagattaactagtcataactgtttatacaccactctcatattttagtgatcaatatgaagacagctaaataattatcctactttttagacaggacagatactctcaacagacaagaaaaaagatttagcttatcacaagaagcagacaatttataaaactacacaatgtctaaactctatgttgctcagtgtacttaaaattttacagttatatttgtataacgtttatatttttctagaatacatcactatttacaaaagtacaattagaaacactgttttttttaagtaccgtttttattttcataacactaataatacactgggattgagaatttctgttaagtgttttgctgacgttgttttaatgaatactcaaaaaagctttgcagatttgtccattgctcttgttcttaaattatttttcatacttgtctgtatccaccttctgaagacacacaagtgtttactgtcgcagtttcccagcgttatttcttaatacttgagtgttgacacatttttgtaccatcccccttttgtaccatctctgctcacaaagattatatgcaggctttgaagaggaggagatgcagaagataattgaatttgtatcttgtatgcctatgtaattcaaagtgacttagtccattgaattgtgttcatttattagttggctggttaagatagcattaattatcttaaatttattcaactactaaaagtctcaggcaataggacagatgagtgtcatcatttttattgtgtggcatacttggagctataatccaaacgttttactcaacaaaataatgctagagtaactgatcaatttggttaaattgaatgaagaaccaagtgaacacagagaaaacttattcggacaagtagacccagcacagcaaaaatttgtctgaaagataagacaagcttataagaccaaagctaagtctaagaaaatctaaatggaaaaaaaattgcgtgttcagatccaatagtgagtgatgtggtacaactggaggagttagctacttgcttcatgaatttgtcaaaagtgaatactaataaagtgggaggcttcactaaatgagggggtaaataagatttaagtttatcagaagtgtgtgtattgtgtgaccatactaagcttctgggtgtaagtaaagatgctggctattttacaactttttattgtattgtgttatgcaaagtacattttggagataaatgtttttcagcacattaatgtctttaaattcaggttgtattgggtgtattttacaactatttatttttaaataacatttagggtgtgttttcccccattttgtttgttctctatcttacctcatcaaactctttacgatttaattgaatatactcatgttaagtgcaatggcattagttttattcaaaatcccacatgggcataatgctttgaggccttgattcctacatgttcattatgcataatgagcttgtcacctatctcagcaataaaggttctgacc

SEQ ID NO: 15 - DNA, 41 bp, Homo sapiens
taaaaacaacatttattaagtgcctaccgtatgctaaatgt

SEQ ID NO: 16 - DNA, 41 bp, Homo sapiens
taaaaacaacatttattaagggcctaccgtatgctaaatgt

SEQ ID NO: 17 - DNA, 51 bp, Homo sapiens
agcttttgtcttgcctttagataacggtttctgcctccacattacatgtag

SEQ ID NO: 18 - DNA, 51 bp, Homo sapiens
agcttttgtcttgcctttagataacagtttctgcctccacattacatgtag

SEQ ID NO: 19 - DNA, 51 bp, Homo sapiens
tataccaatgcaatctgtactagaggatacaaaaatattgaaatcacaaaa

SEQ ID NO: 20 - DNA, 51 bp, Homo sapiens
tataccaatgcaatctgtactagagaatacaaaaatattgaaatcacaaaa

SEQ ID NO: 21 - DNA, 51 bp, Homo sapiens
aactgcagctgagtcctactggaaatcctctgaggaagcctgtagaatgtg

SEQ ID NO: 22 - DNA, 51 bp, Homo sapiens
aactgcagctgagtcctactggaaaccctctgaggaagcctgtagaatgtg

SEQ ID NO: 23 - DNA, 51 bp, Homo sapiens
ttcttggtagaaagcaaggtttttgagagtaaaagcagaagtcataatacc

SEQ ID NO: 24 - DNA, 51 bp, Homo sapiens
ttcttggtagaaagcaaggtttttgggagtaaaagcagaagtcataatacc

SEQ ID NO: 25 - DNA, 7521 bp, Homo sapiens
  misc_feature (6692)..(6692): n is a or g
ggggctgggactcgatgcgactcaaaggtgagtttcgaggggcggggcggggccggggccaggtgcggagcaaaggccggagtctggcgggggtggggcaggcagggccaaggctgggtccggggcggggcgggcctagacggggcggtggaaggggcggtgccggggcgggccggggcgagaatggtttcagaactgccgagggctggagggaaagcagcgggaggggcggagggaggggattcggcagctccagttcagctcgctcggcgcacccacgcctcgctgccccgcttcctgccctcaacctgggcatgcgccccccacccttccggccccccagaacccgcgccatcccccggagcctccccagagctggccgcgcaggatgggcgccctcaggcccacgctgctgccgccttcgctgccgctgctgctgctgctaatgctaggtaagccaggcccccgttccggttcccggccctgccgggcaggtgcctgccatccagcacccccctagcatttcggggctcctcacatcctcctccgtcaggggtacctccagcctccccggggtcggcgtccagctgcgctttgtggctgtccgccgagccagtcttgggaagagtgcaggctccccagctctaagccagggactggggcgtagagaggacccactaaggtgctgccccaggcactgctcggcctcccggggcaggccacacatctcagctagcatacccacgtactggggtcgctgcaccaaatgctgcgactcctttctgccccacactcagctccaggcctggccttgggtgcccgccctacgagggcagtgcctgcccagcttcataattgccccagagttggctggaggcccagaggccagttctgcccacgatctttgaagtaagtctctcccagttgcgctccacgcacttcatcaactgggggcagttccctctctcacccccatctccaccctgggttgggtccctctttgcccttcttcctgtctcccaaatggcacttggctctgcagccacccatcagttttcacaccgcttagttccagcttccttgcctcaggagaaaccaggttccatggagactgatcctgggatctccaagcaccttgtgcctgctgtggtgggtgttcatggtggggtgttctgggccaatcttgcatggatgcatggggataatgacagtggaattgtttttggcctgaactggagggctccctgtaggaggtggtctggggaagagtatggcatggagacagtgaaactgccagtacagatgttgatgaggctgaagcccttgaaatgagagtgaagcgtgggggtggggatggtgacttcagagctgctgtcgtcaaggcagaggctgaaggtagccccagctgcctgtttctagaccagagctccacagtggcaccaagcaaagccttcccctgctgcaggtccctgggccctgcagggttaggatgagtcctctccctggtccctgggcaggtggcaggaggatgtacagagaggaaggcgctgtggggcctgggttgcctagcacttggtgtgttttccccagtgggcagcatggagcagggaggagcccagggaggtggggaagtgctggcctgtgtttgaaaaaggagcacgcagaggtctgagcacccactgcctgtgggcacttacattcatttcacaaatgaggaaaatgaagtaacttgccccagagagcacatttagtgagtgttggggctaggatttgaacacagatctgattccaaagcaggcctctttgctgtccctttccttgctgcgactgatacagaggaggggagagagagctgtgtggcaactgatttcctaaggctgtggaggtgactttcccatgggcatctccaagcatcagcagttgtggagccaggaaaatgggagggggccttctgagcagtctgccctgaggcagtcagggaaggtgtcagcttggctgtctccaccgtcactctgattatgaaacttgcctggcctggggcagggctctcctgagtcacatacgcactcacacatggtcagagctggagctcttagttctcctccagtgtggaaactgaggcctaggacagaaagagactggatcccaggccacacagctgggcatggggatggtgctggaatcccacttcctgactggcagctgtgcccttaacaacagaccatgagttctccctgtgacccagccagaggatgaaggaaggggctaggagcccagaagcaggggtggggaagttcagaggagccgttctagagaagctggagggtagagtttgaccacagactcctgggcattttcctctagctcctgcagaaagtccatggtatccccctgggaggcctaaaagtgacactctggttggtgaggtcagtcccttcaggcctggccttggagtttccccatcttcctctctggttttgcccctctggaggagtgtgtggaagccatctagggacagcatgatcttggctaacatattatacttttcctgccttacctttctcatctgtaaaattgggagaggtggggaggggtggcctagccctctttacattgaggttctgtgatcttatctagtgggagctatggaaggaaagaagggaggagctaagccctctaagtctgccaggagtatctgctggggtagggttgggcataggggtggagtagggtgaagaagagaggtttggcctttctgaagggagagagatgagaaggggcagctggggatttagtgcctccctacagaaagagagccatatatgtaaatgaatgcataccatgtgcaaatgaaggcttttgttaaggaactggggcaggcaccttctgtatctgctgggctagcccggaaggttggcaggcactggaggaggggatcttctgcccccaatggccagggcagagcctggatcttgccccagaagccccagctgcctgggcagccctgtggggtgagagaagcagtgagctcatggcgcagctggagaggggagggcattgtgtggtgagaactgactgggcctgtgccctttccagctagggtcactggctccattgtctcgcccaggtgacacagctgagccaactagcacttctgagcaagactgccagctcccctcaagcaaaggagagggacatgtagtctcagagtcccctagccagaaggctccccttgccaggtgctgaggaaggaatggcagacatggaggtgggtgagtggcagggacagatcaaggttcagttggaaccaaggcctggttaggtcaggaatcagatgtactcctttctgccttcaggtgctctgcttctagtccgccagaaatgggatgcatctggatgccaaggcaatcctgggcccatgccacctccttgagatccaggtgtcttatatcacagcatccctttcctattctcagaacagggtccaagctgtggacaagctttcccaggtctcctttccttttgtaggcagagatcaagaatggtgcttgtggcggcagagggcatggaatgaggaaccaggcatctccaactccttctgcctttccctacaggaatgggatgctgggcccgggaggtgctggtccccgaggggcccttgtaccgcgtggctggcacagctgtctccatctcctgcaatgtgaccggctatgagggccctgcccagcagaacttcgagtggttcctgtataggcccgaggccccagatactgcactgggcattgtcagtaccaaggatacccagttctcctatgctgtcttcaagtcccgagtggtggcgggtgaggtgcaggtgcagcgcctacaaggtgatgccgtggtgctcaagattgcccgcctgcaggcccaggatgccggcatttatgagtgccacaccccctccactgatacccgctacctgggcagctacagcggcaaggtggagctgagaggtactgggccctgggacggggtggagccacacaccctctcaaggcagaaagtcaaggccacaagtgacctatctagttgccccttaggttttgtagccaaggaacttgaggcccaaagaggttaagtgatttgcacaaagtcacccaataactcagtggctgatgtgggactcaaacccagagttcctcacccaggccagtgctcatcttatcatattaagacccctcctgggagaagaaatgtccttaagttgtccagtccactttccattcccaagaacgaagaagactgttgggttgaatagcctctactcctggacagtacaggacccagatctgggaaagagagtagagttagggaaggagttagaccatgtgacattctcactctcttaagtttctttgtcttctgagaagaaagagccgcttttctcagtatttcaaacagaggtcagtctcaaacataagggtgagtaggcgatgggctggttctatgaaattctacaagtatttattgagcgcctgtgctgtgcccagtactgcccttggcaccactgagttacagaagaaataatacaacatgcgatctttgccctctgggagctcacagtttatttagggagataggctatacacaggaaacagtaacaagggctgccagctcccagccctccctcactccagctgttctctccagttcttccagatgtcctccaggtgtctgctgcccccccagggccccgaggccgccaggccccaacctcacccccacgcatgacggtgcatgaggggcaggagctggcactgggctgcctggcgaggacaagcacacagaagcacacacacctggcagtgtcctttgggcgatctgtgcccgaggcaccagttgggcggtcaactctgcaggaagtggtgggaatccggtcagacttggccgtggaggctggagctccctatgctgagcgattggctgcaggggagcttcgtctgggcaaggaagggaccgatcggtaccgcatggtagtagggggtgcccaggcaggggacgcaggcacctaccactgcactgccgctgagtggattcaggatcctgatggcagctgggcccagattgcagagaaaagggccgtcctggcccacgtggatgtgcagacgctgtgtaagtgccacttatacatcccactgtgggagctgggagggacagtatcctggtgggcactgtggccacagggggtaccagatagccatcatctgactccaaggaactcatcttccacagagtgagcagccttgctagcatttctctcccccggcccttgatgggttttctctgctcagaaattgggtatagagataggaggcccatgctgaggggtgagattcaagcccctaaatagaaagatggtcatacctagtgagggggagacaggaggttttgaagttgctgctgtcaagtaggaaacaggaagttggggaatcgggtgcctctgtgtcccctcctgcctccatgacacctcttcccctacctgtgtttcagccagccagctggcagtgacagtggggcctggtgaacgtcggatcggcccaggggagcccttggaactgctgtgcaatgtgtcaggggcacttcccccagcaggccgtcatgctgcatactctgtaggttgggagatggcacctgcgggggcacctgggcccggccgcctggtagcccagctggacacagagggtgtgggcagcctgggccctggctatgagggccgacacattgccatggagaaggtggcatccagaacataccggctacggctagaggctgccaggcctggtgatgcgggcacctaccgctgcctcgccaaagcctatgttcgagggtctgggacccggcttcgtgaagcagccagtgcccgttcccggcctctccctgtacatgtgcgggaggaaggtgagagggggctgggccctggacggggttcgaggattgtcaaccccttttccttctgtttccatgacccctccctctccgtcagctgtttgcaggccacagcctcacgctcctcttctaccaagattgtgggaataccctgagtttcctggggcggtgcttggcggcagccctaaccccatgctccctggccctgcaccctctgaccccatgtcctttgttctgcaggtgtggtgctggaggctgtggcatggctagcaggaggcacagtgtaccgcggggagactgcctccctgctgtgcaacatctctgtgcggggtggccccccaggactgcggctggccgccagctggtgggtggagcgaccagaggacggagagctcagctctgtccctgcccagctggtgggtggcgtaggccaggatggtgtggcagagctgggagtccggcctggaggaggccctgtcagcgtagagctggtggggccccgaagccatcggctgagactacacagcttggggcccgaggatgaaggcgtgtaccactgtgcccccagcgcctgggtgcagcatgccgactacagctggtaccaggcgggcagtgcccgctcagggcctgttacagtctacccctacatgcatggtgagtgacaccccctccaccctcctcactctgccttcctcctggcctctgccactggccttcccttcccatcttctgaccctcctgctactatctctctcctccacattatntcacatgaagtctcaaaaaatccaacttccagccctgcagtgcccacctgcacggggtcctctgtggttgatgctgacttgcatgctgagggggcaggctgtgggcagggatgggggtgtctgtgaatggagaaggtgggttcagagaacttgatggggaaagcgcagaggcaagtgtatgggtggaggatgatggcatcctctctgaacagtcatcctctctcccccagccctggacaccctatttgtgcctctgctggtgggtacaggggtggccctagtcactggtgccactgtccttggtaccatcacttgctgcttcatgaagaggcttcgaaaacggtgatcccttactccccaggtgagggaaaagaaccccccaaccttgttttcattgggcttcccacccccaagtcctgaaccaagctgctccctcccaggccccacctggaggaggagtaggcagctcagatccacagggccctgttaaggggtggaggccgcgagggagccccactcagggctctctgtccttagcccacaccgggcacccttttcaggtcttgcaggtgtcactgtcttccggcccagctccaagccctcctctggttgcctggacaccctctccctctgtccactcttcctttaatttatttgacctcccactacccagaatgggagacgtgcctccccttccccactccttccctcccaagcccctccctctggccttctgttcttgatctcttagggatcctatagggaggccatttcctgtcctggaattagtttttctaaaatgtgaataaacttgttttataaaaagcag

SEQ ID NO: 26 - DNA, 51 bp, Homo sapiens
acccttttcaggtcttgcaggtgtcgactgtcttccggcccagctccaagc

SEQ ID NO: 27 - DNA, 51 bp, Homo sapiens
acccttttcaggtcttgcaggtgtcaactgtcttccggcccagctccaagc

SEQ ID NO: 28 - DNA, 560186 bp, Homo sapiens
  misc_feature (223202)..(223202): n is a or g
aacaattttactgaatatttttatttacttaacagaaacattcacttattagatatcactgaagtgcaatttatagaacttagaggcaaattaacatgtaaattcatattttaaggttttggatttttttttacaaatattacaaatgtacatccattgatacaatattgccattctatcatgctttttatgtacataccttcaattagaattactatgtgttaagttcattttgcttacaaaatgctgaaaactaacggggcacactgggagagatttttttttttttaccgatgcataaactgcagagagatagaaatctagggcctgtgtgaaaagaggcactgggaccaggtgatctcgccttggtgtttagggaatgctcatccctccaaccttggcttaggatgatgagttgggaaataaagtgttcctctcaccagggtttgatctgtctgcggttcccgcaggagtgatattgtttggtgtgaatctctagaggccagcgcggtggctcatgcctgtaatcccagcactctgggaggccgaggtgggcagatcacttgaggccaggagttcgagactagcctgggcaacatggtgagaccccatctctaccaaaaatacaaaaattagccaatctcataagccggtctcaaaaaagtaaatagatctctagagatgtggccaccagcgttccttctggtgggaggtcagaacatgtggacacattcaggagagtccaaaaatgactgcagcaactccctgtgcacaaggcatcaggaacccagcggggctcccccagccccagcatgaacctgttgtgtggatccctcgtggggggatggtgcctgagacctcctcctgggtgggggccacggcagcagaacaaaggagccaggagttttgggacagggactaacaagacagcaagaaagggaagaggcgaggaggagagaaagggttgagaagggaagcgaagaggctgaggggagagtgagcggagggtggtgctggccgcctctcaggcttcccagaaacagcctgagaaggaagctcctctgtctccaccgcatctctggttggtccctgtggcctctgctcctgcctcctcacttccccaccatccttccttcactttctcggattcagaatttgtgggagaagtttgacgggtcaccagcagcccagtgtttccagaaacagccctgctcctgcagtggcgaggaacccagacagcggcaaggcctacaccgtgtcctccagccacccgcctagccccacacagtggcaaaataccaaaagaccctaaaataccagcgaggcggggggtggtctgtccctgctaagagctgcctgggggtgctactgcctctcctgcaacacagggcttctaaatttccacctccaaccgcgagctctgcaaaaactgcaggcgaggacaggctttggaggtatgtgggatggcggctccctgacatggactaggggactctgcagcctccctgagggccgcgggaagcccacagagcctcaccgggttctgttgggtgttatgagaggcggctgcagcgatccaacggtagtacataaaaggaaagcctctcagcttccctttggtctctgttagaaagtgatacttattgtattttgggccaattagtcagattattttattagaatggcttcttaaaaaagggcatataagtttccctaaattaaaaatgtctactttatgtacgtctcaaatgtcttcagttgttttaaacaatacactatagacacatcttgaaatttattatctaaaaataggatttcatcaaaataactattctgggcattgatatcctctgtatttactgtttatggctctccagacgtgataaacattatatccaaaaaaaaaagcatgcgactttgttgataagaaaagctccctgtgaaaacaaaatgagatggagaaatatgatctgtgtgtttctttgaaaaggaacccagcttgatgtttctgaggaacaggactcatcacaaagtcagcatggtgtgatagatatatacagatgtaaagagaatcacaggaatggaaaggaaacaatagctatcgacctgcacatcctttcctcagcaaaaacaaaacccacagaaaccctaactctatcccttgatatcacacacggctgcaaaaccggggctggaggtggacagcggaggctgcctggccgcgcagccgttccctgcgccccgtcctgcaaaaaggccagaaaccaccagacactaactttttgactaagaaccaggccggaaaccacattgctgatcttcctgatgggaaagcagtgtgtgttttggaggcagataaaggtggtgctggttttatgaggacttttgtaggggcctaagcaggcatgaatatagactacagaaaatctgaagcaagggtatgaatacagaccacagaaaatctgaagcaaggggcttggcggtgtcaggtggtgggaagtgcgaggaagccagacggtgatttcgaggtggacttggaggggcgggcctgacttcatcagccccccttgtgtcgtgcccagcgtattttcagggtgacagaaagtgacccatcccctacttgtgtcgtgcccagcgtattttcagggtgacagaaagtgacccgtcccctacttgtgtcttgccccctcacttggaggggaatgggtggccactcttaagaccaattcagtggtcaaaactgcagggcagacatggcctgaaagtggtgctgggatgttctgacctggacctgagggcgaaatcctcaggcttcaacacgagcccttccatctctgcagaggtggcacagcccctccaggcacatccagggctgtgggaatcctgggacctgggtcttccaggcacacctggggctgtgggaatcctgggacccggcccccccaagcatagctggggctgtgggaatcctgggacccagctcttccgggaactcttggggctgtgggaatcctgggacccgggtcttccaggcacacctggggctgtgggaatcctgggactcggcccccccaagcatagctggggctgtgggaatcctgggacccgggtcttccaggcacacctggggctgtgggaatcctgggacctggccccttcgggcactcctggcactgtggaatcctaggacctggcccttcctggctgggtcaggccctgccagttgggagcagcctgcgtgtggcgtgatctggtgtggcgtgcctcctgcgtgtagggtcacccttgactgcctcgactaccttctcctttcactacccagggcctgggaccctcctttccttacgtggggtcccctctgcagcccacatcccctctgacagatccctccacggaaaggctccggcacctcaacctcactctggctgcattggaaactcttctgtcgctatcggccttctctgaagagctttaatctctccttccatggagtctcctgtggacttaatacacgaatccatacacttgtactaatgggtagcatggaattaatgtgtggctttctccagatgtggatgttgatatttcagtaaagtctgagttgtttctggaaggtcaatgcctgagacaaaacgaatcccaaccccccagctgtggcttcatgatgctggccactgggtggccgagcgctttccgagtcccgtgaatcagaccctgcgtcttccctgtgacagtgaaatctgcttacaacacaggccccctcgctgcagaaacagcgtgatttggagcccactgggacaaagcattatatgcttctctagccaacatctcagatgaaggtgatttgaggcctgggtgggagacttcagccaggagctggccgtgctcccacgcattcaggggagcgctcacttctgactgctgcgaatgtctgagccacccatcacctctcgactctaagttctctaagcttcatcctagtgatgtcaagttaccagaacttaatagaaactggtcgtttgagcttagcttttgcactgaattaagatttcatttatttttgtgatttttataaaagattaatgtgagtcctttatttgaaaaaatgttctcgtatcttttgaaactttatctggaagaagttgtctactccagtacctgttttcttttctaaaagaactcgagtgataaatttggcctgattttaaatcccaggaaaagtttctttttccatactaatatctctacttcttattatcttgtaacaaatagctacaactcagtttcatttctgccttctcattatgataactgtaatttatagcacttgactatgtacagcacaatgttattcttgcactttctggggtggtcagctgggattctttccgggaagcccacaccccagaggtggacaccaccatgctttgccgtctgccatcactgtcatgaatttcagagatggattttttaagttggagaaatgagagactggctatctagcatgatgaatgttagaaatgagttctcggaggtgagatgacagcagctcgaggtacatggattacgtaaagatacttggaaaagagcctgaccccgtatgaatacagcgccttggctctcagggatgatgctgtgggctaaagcccccatgtcccatctccactgtgagctgaaggtctctggtgttggaagcctgctctgagggtcacagaatcctgcctcttacattttttgacagctgaacttttttggggtcttgtcctgcaaggtgttgattggagaatctgaaagaatagagagctggtagcctctcaagctgaaggtaaaggttgttttgattttattttgtgcttgctttctaatgaaaatttagttaaaaaatcagaatttgatcaaagacttggtctccttattacctggtagggaggttatagggtggtagctaacccttacacaacccagacctcagtggctcttagtatcggccaccataaaccaaacgccatgacggactgaacaggcatgggccaggtgtttccgggctccccacatctgcagcacgcgtgggccgggtgtttccagactccccacatctgcagcacgcgtgggccgggtgtttccaggctccccacatctgcagcacgcgtgggccgggtgtttccaggctccccacatctgcagcacgcgtgggccgggtgtttccaggctccccacgtcacaggtcttaactctgcctcgcaggggttttggaaactgttccttcactttgtgggaatggctttcgtttctctggttctattttaggtgttcggtaatgtcgtacatcttaaatcttttttgaaaggaggtggagtataaaaacctaaatgaatagtgaaaataatagaggattcttattggtttctctggggctggggtgggcatggcttttctcttcatttgtggcttatcttcatgtgccccctcaagctagtgagaccccagcatcaccaagaggcgcacgcaggggtggggtgcagggacggggcctgaggctcactcctgcctggtgtcgtgtcggtgcctccttccaaggctgcagctaaaacccctttgcctgaatggagcccctccctcagactccacaggaagagtcggcgctaactcaacagtgcatgtgcccctgggtgtgggggacagggttctggggccagcgatctggaaagaggcacgttctgaatttgtgttgttgctcgtccaaacattgcacactcgcgtgtttctgggacaccaaagtaaaacgaatgcagggaaccggccgacccgccacgtcgccccccagacacggtcccatccctccagcgtcccgctcagctccagcagccaggagcccgcagcctagagagtcagtagaaactgctgctgctccggtggtttcctcacccaggtgcccaggccagccttctgaaaggccttgaacagctgctgtttcacagactggtaggtgtgcgcccccagcttggcctcacagtacatggagggcgtgtctccagggctgggtgtccgtgtgctcagctgcggacaagaaggagaaagagccaatcagacaccagcagaaaaggagcttctgctaggtgagttttacatgccaggcatcagctcctggccttggccttctgcctttctttctcccactattacagagagcaactgtgaccaggtcctctggcaattccacaggaaacctagtcatcaaggaaacccgcttcatctgaggtgtgaatgatgaatgagcggataaacttgactgctactaaaagtatgaacactgtgcaggggctccaggcagggttggggacagagggggacagtgggagctaaaacagcatcacagtgggcagggagcaggctggtgagagtcatgttgtcggctgagcaggaggatgatggagctggggcgtttcctctgttagctttctgaggtctgccaggcaaagctttgcagcaacacaagacagggatcaaatgcagctctgatacccccaccacggggcagggaggccaggagggaagaggatggggccatgggggagctccaaatcccacagcgggtcttccagggaggcactcaccggggggtcacctcgagcatgtgcaagaggagagggcccttttgctcagcaggacagcatcgacgcttccctgaccttccaagtctccaggagaagggagaccccggcagtgcccttgagcggacaggacagaggctgagagctgcaggatgctgggcgtctcggccaagctcagagctaatatgtgcaattctgagtgtcctctaagttggctaaaacgtttattttaggcattagtatgcctgccctcctctaccagttgacaaatcaacactattattcctgcttggattaaaaagtgtggaaaaatgagagaggcattttttatgtgttggctggtttttctgttatttgttgtttttggttacagtctatgctttggaaatgcatacagatacagattttgatttaaaatccagaaatattgctgttatccctacttgtgaaggagaaatttgctcctaattgtggatgtcgtggaaatgcttgggctttggggttggggagaaattcgaattctgaaattcattacctgtgaaattttggggaaattacacaatttttctgagtgtcggtttcctgatatctaaaccgggaatagtatcgacttcaaaagtccccaggagctgcttctgggacaccccgaacaaagcaggtggtgccgtgccggctccgtcaggggttcagcaatgagctcctttcctgcttctgcagctccagcctggtctgggggcggtgcctggggtagcagggtctcaagcctacaggggaaacgctgctggcctgggcagctgggaaaaggacatgtgatgggcgctgtgtcgtgcatctccctccctgcagaccaagtgttggcctctcccaagagcttgctcagggctggagccagggtctggctgggtccagtttccctgcaaggatgggtgcgacctaccctgccatacagccgcgcccaccgtgcagacagcacgtgcttgcagagccgggatgggcccccacagctcctccgcccagtggtggcgttgataatctccaggtccgcgctgcccacgacccagttcatgctgaaggggggcgacttccccggctggcgcgcctcggcgtcactcacgcctgtcggggagatggggaaaggcgggcgttaatattcctggcctcacacggggctcccccaagggcagctgcggggaaatggagcctgtatgtgagtgggaatggtcctcccttttcatcctcaggactggccagttcacgtgtcacccgcagggcggaggctgcaaattgggcaggatcgtggtggccgcctcgggtccacggcgtcgctgcacctgcgtcaaccttctaatcgaagattttaatagtctggtgataatatagctccgtccagattccccccccttctgtaaatattagttgagtgaatgaatgaacagagccacgtggaagtgatctgagagtgtgtttatcaggcacctttgcaggccccgctctgctggaggcaaaacaccggggctagtaagcaacatgcagctccctggctccctcgggtttacagtttagctgatgagaaaaacaaaacaaaacaaaacaataaaaaccaggcagaaatgagtgtaggatcaattgatccgcaatgtgatcctgaaaccgcactggctacagagtgtttgagactcagtgcacagcggaaatatggggccttttgttcgaaagttacgaagaatttcatgatgacagtggggcgttaaaccaagcatgggttcgtctaagctcaggtgcctgtgtgagctgcagggctgcatgcccacgatgctggtcctgtccagagagagccggcatcttcagggaagccctcgtttcaaaagtgttgcctcttgtgtgcttggacttttaacccggaccatacagtccttgcagcccagctcacagtgcagaagggtggatgaggaggtctccactctggggtggcagctgctttgcagctgggggtggtgcactttctggcttctaactgtggccccagccctgactccttgaggtgctcctgtgctgattggggcttctggacatgctgccacaagatgtctggaaactccagggggcacctgccgagaccctgccctgtgacggcctgaggattccaaaacatgagattccggtgcagctgagccccgccaattcattgtctctttcagtcccttctgaaggctgcatttggcaatgtgaccctcggggtggggaaggcatcagaggaatacaggctatgggacgccagaggcagcgtcctggggacaaagcccacttcttcccatgcccagggcttcctcatggacccagcatggtggacgtggccctcagacgtccatgggtggtgggggaggcacgtgctgtttggccctgtctctgctcagagtctcataggaagatgcatggtccacacaacagtgagtcggcagggagtccaggctcccactcacagcagtggtgttgagacgcttggtttataacccaagatcccttgtcccattggtgcctcctgaatctcccacctcccgcggcacctgcatggcctctacctgacgcgttccccaagcccagctggccgggtgtctccctctcattcatgcctcctcgcagatcagctctgcctctccagcccttcctgccttcctggcctgctgtcctgtggtgcttggaggcgagcggggcccctgagttctcgggggcccgtcatgcatcacgtgagatggcggtgcctgcagagaagaacttggcgtcttggccagggcattgcatataggccagccaagtgcctgctcaggtccctgggaagccactggctattggtggagaggcccaggtgtcagcattggtctgagagcaaagacctggtgggctgagctggtgcgagtgggttcccgccatagcagactcccgggaggaagctgtccccacgtcacgtggtagcacagctcataacaccttcctggaagcaggcttcatttaaattcggggaagacccactgactacagagttgcacagccacagaccccagatcctctgctgctcccagcttcatccacgagcctgagctctgtggacagactgagcacatggcccatttgccaaccacttcgaaagtcacctggtgagcttctgctggccacagacaggtgatgtgggacacccaagcgaatcccgttcatgtcagctcttcctttttccttcaagtgattcacggtggcagctgccaccccgagagccgggagggacaatctggcccgttggccgctgtggctgtcctactaggcaggggccgcctgggcaggaggagccagccaccaaggccagggatgaccgggcactgggagaggcagtcactaccctgatctgcgtgcactgggcagcctcccctcctcctcccactcccgtcaccaggcggcctcccctcctcctcccgctcccatcgccaggcggcctcccctcctcctcctgctcccatccttctggtctccatgaccatcagggccaaccactgaggtgccaagctgcaaagtctgaactcagaggaaagccttgggagcctgaggtctacacaggacctcctggttccttgtcaggatgccctggctccggcctgtgcccctctcctttctctttgcggaggacgttgtgggcaagttgctgctagcccttggccagctgccgtctgacggggtttcctcccaacgctcctggctgccaggcatgacgaggcccaaacaccaccgggaaggcagctgtgaggacgtgggtgtgaacccagcacgtgcactgctccacactccggggacagaaggaaggagctggtggggcagcgagggaggcgctggcgggtgggctgcggggtcgtccagccttgcatgggggcttcttctcaccagggtgtggtcccatgtgtccatatgtgcacagggaggacagtgtctgctgtaaataacatctcagctcacctgtgatgacgtaaatcacactgtaaatcattcagttctaactacaacagccccgcaggctactgtttaacatagaaagtggtgtaaacccaggagcaatcttcaatatccaagcctgtccatgaccccggaggtggaaaatgcaccccaggggcctctcccactgaccaggaaccaggtggctggagttccaggcagtttgagttctgtggcccgaggtcatcctccacttaccgctctgtgacaggtgacttctctacttcacgaggtgatgtgaagatcaaaccaggcaaataagagcacttttggagcacccaggctatgaatgctgctgttttcatctgaaggaggatttgaaggccaactgcagtttgtttcgtgttctccaagtcacacagatcaaaaatgtttctagttagatcacagggaacatttccaacttagttacaatcacctaattgtgtccagggaacggaggaaccgaccaacaagcaaaggtcagttccttgttcctttcacggaaaacacattctgttccctttatttgtcctctgcaggggacaggaccatgtgcttacgctttgagcttctagggaagggtctgctcccctctgtgttctgctggcaaaagaaaaacttcccaaggcagcctggaagaatagcagtcctttttttttttttcttctaccttcttgtcttttttttttttaataaaccttccatagagagatagtgttgggatgtttcctgaatactcacacaggcagtagtttctgacatcgctgtgactaatatctgcagctgatcatgcccgtggagcgggaaccacggcccagatccctggagtctaatgtgcagagaaacggatgctcatggatgctcatgtcagtctcactattaggtttgccgttaatgactctttccatggaacagatcccttatggtgagaggaagtgcagtcaggagcgggctgcttgctctgaggaaccagaagtttccttctccagtgcggccagcagccaggccctcttcccacgctggggcccagccctcccgcaccaggtgcccaggctccaggagggccatctcttcctcaccgacatggaagggccatggcctcgtgcgctttcactctctttccatttccccgcagcctgagtcaccctcaaggaggtaactccctgtcctgggatgtctcctgaggacactccagcattgggacatcaggtcactccaggctcttcctttctttgttttatttattttggcctgggggagccacttggtttctcaggagccttctgctcatgtgtgaatgatctctcatggtgcactgattttataattttccaccagtttcccaggtgccgtacaaagacatgcagagccttctgggagctggtccagttgcttgctcatggtgttcctgtcgagcaccttcctggccgtggagaagtgggtttcgaaagggttgaaggtgttagggctaaactttaactcagctggattgcattgctagcggtagttgtggatagagccagacaaggtgaagacacatgtgctcaggcctagaaatgaaagcctggcttgtgtttaattttaactcctgtggctggaaatgtgaaaatgcattaactcctggctcattcctcctgaagtgggcatcggctgattgaagacggaactcgagtcccaaggacagagggtgtctgcagctgcaggggcacctactcaggcctgtcccaccctgttcctcaagataacacagcagcacatacctggtgacccagtccacccagaacacatggccctacctccttccccagaacacgtggcgctacctccttccccagaacacgtggcgctacctccttccccagaacacgtggcgctacctccttccccagaacacgtggcgctacctccttccccagaacacgtggcgctacctccttccccagaacacgtggcgctacctccttccccagaacacgtggcgctacctccttcccccgaacacgtggcgctacctccttccccagttcacagcacaaaatgtctcctggaggggattcagggaatctccagcagtgaaaggtgccaacagacctgtggcgattgagggacagagcctgtgtcgtctgaactcagaaaacgtgagcatcaggccagctgagctccaaggagaaatgcgtcctcctgagaaattgcacgcaggagtctgaactcagaaaacatgagcatcagcagctgagctccgaggagaaacgcgtcctcccaagaaattgcacacagataccccagtgctgtggacaaacacgtacacgtgcttgcacaggggtcccacgcttctcactctgcaggccgccctgtgaggccaaaattcctgtgaacctctggcatccagaagctacaacaaatccaaattaaccctgtggaacacttctgtgatgcacctcctgccttcggtgtatggcaacacaggaacgatactgtgtattctaatgtggtttccacatgcacagaaaattgtacttttgtaggctgtatttgttttaggtgattgctgtaacacattgctacatgtgttggcttaaaagagcagaaatctgtcctgtcgtagctctggaggctggaagtctgaaggtgtgggcagggctgtacctccttcagaggctctggagagaccccttcttgactctcccagcctctgctcaatcccaggcttcctggcttgtagcggcttcactcccatctctgcctgcatcctcaccggcttctctgcatgtgccatatctcccccgcctccctcttctaaggacagaggtggctgcaggcaggacccactgagataattcagatcatcttccatctcacgatccttagtttactcacatctgcaaagaccccttttttcagacaaggtaatttacaggtcagggattaggacttggcatcggtgggggccattatccagcccactgggagtgaacttcgggactggtctaaggacggagtgagcagcgctcttccggaggaggggcagccccacgctctgggccccacacttcgcagaacaggggtttgcacgctctgggccccacactctgcagaatgggggtttgcacactctgggccccacactgagtagaatgggggtttgcacgctctgggccccacactccgcagaatgggggtttgcacactctgggccccacacggcgtagaacaggggtttgcaggtggcagctcatgggctacttctccccgcatctgtttctttccctctggaccttctgtgtgtgatgaggaccagcggggctcacggtccaggagggtggggggccagggctgcccagagagcagttctgtgccactggctggatgtgcagagcaacctggggatgcacggggcacccggcacgtgcacctgctgagtgagggtggcctccgttgggtaggaccttggatttgaaaatctgtgtaggaagcccaaggaagggtgaggaaaaaaggtgtccctgaaacactgtgtagcctggtggtgagcagggtcgggccccacgtttttttagtaattgctcccaagcggccttgggaataacgccctcgctacctgagcagcttctccctgagccgtctgtaatggaaccacgctcacagacgcttgttaaacctggtacgtaactcagggatgtgttgcatttattaatttgtaaatataccatgcagcatatgggccattcatctctgagaacattttttagggagctgtcttatttcagagtagatctgtataggaataagctggtctcccggagcctttgacatgaatattctgccaggttgtctggtgtacagagatcagcctgatgagattgtgtgacctttttgctaaacacacacaatcgtgttaacagtgggctctggcagcagagcaaagctggactcacttctgtgacatactggcagtgtggcttccgacaagtgaattaaccactcctaccagcactgcttcaactaccaccgtgatcagcacaaccactgctgttacatcaccattactaggaccggtgggggtgaatccacaactcatctatgaaagtgagttttactgtggctcgcggagctataaaaagatgcctgacttgaagaaaatccttatttacctttttaaaaaggcattatgtaagtgagacgttacagcatttcttcaaagtgagcctactatatttacaaggtaacttactttcccaaaattaaatttacacaagacatctcaggagtataatttttacatgcagtgaggcaagtctgtgtcactgggtagcactgcatttaattttgcagagtgaatgaaatagcatggcatctgggcctgcacagattcataaagctaaaggaatcagagagatctcctgagttttctatatggccagacacgctgcggggtctttctctctctcacgcacacccacacacccttaatggaagagctggtaaatttaatgtggacttatggatttggggtaactaacttctaaggctgtattaatgccgttttattcattatcattgatatgaatgtctttataattgccagtaattttatagctgctgtcttgctttgatacagcacatttataagaaacataaaaagtactatggaggctggagatggtagggttaactgaggatggacagctggttctttctgctgtgagatagtcctaaaaacttctgtgggttcggcctggcacggtggcttacgcctgtaatccagcactttgggaggccaaggcaggtggatcatgagccatgaccaccctggctaacacggtgaaatcctgtctctattaaaaatacaaaaaaaaattagccagcctggtggcgggtgcctgtagtcccagctacttgggagtctgaggcaggagaatggcgtgaacccgggaggcagaggttgcagtgagccgagatcgcgccactgcattcccgcctgggtgacagagcgagactccgtctcaaaagaaagaaaattctgtggattcctgcaagccagaagggaatatgaatgttgaaaacacagaggccatggtggcttttcctcgccttccctcatgtgactggtttgaggtggaggtgttgagggtggaaggcaggcatctgcagggtgtggaacgggccacgctggctgcaccgtctgtgaatgtcccgggtgcaagttctgctgggacagcagtgatgtccggggatgccaaggcctgggcggtgtcctctcaggagggtttgtgcctccactgatctccaggaactttattcctaagagaccaccgaggagtcgggaggatggacgaccgctcaggttcccccgaggttaaagtgcagaggctcacaggaggcttcagaagatgtgaaatttccatggcagaggaaagaatctgcatttttcatttttcagcctgataatgacatgacttttggcttctgtaaggattgtcattatttcaaaagatatgggacaaagggactttgggggaatggggtcttttgctgttccaaattatgtatttttgtgccctagtactcaaaatgtagtaatatgccaggtttcaaactggataaaagtgtggctggttttcattgctcttcagtcggcattactcatttgagattgtttttcttaagcccagataacacatggagtgttttctggagagtgagtccaccatagttagactctgtcagtgtttgtctgcaaacgctgtctcaccttcgtttttgaaggatgctttttcttgatatcagatcgtaagttgagattgtttttctatcagcattttaaagatgccatttcattgtttttttgtcttctgagaatcagttaccagtctgatttagctcctttgaagtgagtttgtctttcatttcctgactgcttttaagatttttttggtctctgtttttcagcaatttaaccactgagatgagaattaaaaaaagttattcttggggtacaatgtgcttttcaaatctgcatttggatgctttttgtttgtcttggaaattcttagttgtgatctctttaaatatctctcctgttccattactttttctggaactcttattacatgcattcagactttcctgctctcttcactctcttttgtactttctgtgtgtgatggttcattttatgtgtccccttggctaggctgtagcacccaactagattaactgcgagattaaccagcagtcccaggtattgctgggaaggcacattcaacgcgattaacatttaactcattcgactttgaatagagcaggttatgctctgcaacatggctgggcttcgtccaatctgctgaaggcctgaagagcaaagactcaggttctgtgaagagaaataaattgtgcctccacatggcttgtggactctagacgtgccactgccactcctgctgaaacttccagcttgccggcctgccctgtgcattttagacttgccagcctacacgattgcatgagctgatttcttaaaataaatatctatcaatctctatctgtcatctatctatcatctatcatctatctattatctatctatctaatctatctatctgtctgtctgtcagtctatcatctatctattcatccatcctccatatatcatttctgccttctgtgctgcattctggatgttttcttcagaactgtgctcccatttattaattctctcatgtgctgtgtttatttggtattgaaccatcctctgttaaacaaattattttattttctgtatttctgaaattcctatttggttctgtttttttctgagctttcatctctccccctaagtgttccatcttgctttagaaaatgtcctttctcctattgagcgtggtcatattagggtctgtgtctgaaactccaactggagtgtctgtcctgctgcctgttgtttcttctgcatttgggttttatctcctgtgtctgcttgttttttgtgtgtggcaatattctatttataattttttgtagagttattttgatctaatgagtaagaggaccatcttaatttaagtcaggagtggagaccatttcaagctataaacactgtaaggggctgtttgccttgagcccaccttggccctgggaggcaggccgacccgcccccttagcctcccgtgggtgctgaagcacctctcagcccttcagcttctcagggactcttacaggaaaatctcccctcccatccctgtccttccccaggtcctggcttggcaactcttccctctcctgttcactcttgtggcactctccttggtgccaccaaggagaattgcaggtgcccctgccaacatctcccaccatcctcagggtttgtggtgcagtcccatggggagtgggattctccagctttacagaaccttcagggaaccatcattcagtatctgtcaatgctgtacacagttttttttttgttttttttttttttaagataagggtctttagtcccttgttaagttttatgactggcaaacatttctctctcagaatggcagagttttgcaggcctgggtgggagagcacatctaggcagagacgacgttgaaaggttttcatgccagagaaagctcagagttttgactccaggggtgtggctgtgagcaatgagggatgtccatggagaggctgatcctggttcagaagaattgggatggtgctatcagcctgaggcttctgaatccatggagaggctgatcctggttcagaagaagagggatggtgctcttagcccgaggcttctgaagggaggtatggctcactgcagcagggtgaggctttctagcccccgagccagcaaagcacagtggggagagtctggcatcctaagatgatggtgggggccagttggcttttatggcaccgtcctagtctgtgcttttcccgttagccctgtgaccaccttcgtaaccccactgaatcgaggcccatgtgattgtttcaggtctggggaaccaaacagcagcctgaaaccagctggaatcttcccttggtgagaagggagaggaagcccgctgcagcctttccagagtgcctctctctcccgtccgcttacctcacactctcagcccaaccctgcctgtttcccaaaaccctgtgggagcccttctcccagctccattccctcattcctctaggactctgcgcagtgtcaccgccacactgagagtgctcctgatccttttattagggctgagggtcactttttaatccttcttttgcctttttttttttttttttttgacaaagcactcatattttgtttgtccgtctcccctactggaatgcaatcaccctgaggtatggatttttgactattttgttcactgctctattctcaatgtaggattgtgcccggcactttgtaaatcatcaatacacatttgctgaatgattaagcaaatgcctggattatgctgatcaatttctcgatgttggatacatttaatgtattgacaatggaagtattttcctggagttaatgatacaattctcaggagcaatgtaattaagttcgttgcttaaattctactgggaaacaattccttaagatcatggtggaaattaaatgaaaattaattattatacaaaatatttttaaaaggattctccagaaaatgaaaacaaagtttttcaataattttatatttatcataagctatgtgccatctaatttgcctagaaagttctgtgctaatctataaaaatgtcttattaagtagttctttgttgaatttaacttttttagttttcatgaaaagatattaggatttcttttctttctttcttttttctttctgtagacatggggtctggctatgttggccaggctggtctcaaactcctggcctcaagtgatcctcccacctcagccttccaaagtgctcggattacaggcatgagccaccacgcttagctaagactgccttttagattgttctagcaagatttataattttttccaccaaaaattcctgcaagggcatgggaagataaatttctagctctagtgactgtaagaaacagcaggctgctaaaatatttctgtaatgcttatgtgtttattactaaacatttgtaaaaattttgtaggttactccaaaatagacctctgtttaatgtaaaaataatattgcaaatcacttaccatctggataaaatatttgctactgcttcactatgttattttgcaaaatactcttaattatcattaatttcagaaatttctcctgaattaaagaggtctgatactccatagaattttcctcaacttagtgtgacaacattttgaaaatctggactcataaaaaaaatggacataaatggcaacagagagagactttgaatgccaaaaataggtggcattgggaaatttcagaagctattagtattggtacacatttcagtacatatgtgacttcacatttcagtacgtatctaacttcttttctgacaaatggttttgctgtgaaacatggatgcctgaaagggcttcagacgccccagctggcccttttcacactccaggaaattgtgtgctgtggaggaagacagcccgtgctctcctctattttatcaccagcactgcaatgttcatcacgtgaacataaaccaagagtcttaaacaagtcatggttctaacaatcaattctctgggtccatctctcagatttcatgttcgttgccaagaccttgaggtgggctgtaaaaataatcacagttttatcttcagtgtggactaagaaattaatcattgacaacatatctgtttaacatgctgttaacacaaacagcgaatttatcctacccagatttctttttttcttgatgaagagaaataaaaatttagccttgatgttgaaagctcagagaagcatatatcctcagcttggtggaacagcctgtcaaagtggctatttcatctcactttttcctaaaaggatgattattcaaagcatagagttttattaattactatccccatcattttgttcatcttactgaattcactgagaaggaccaagggcaaactcctttaggctatctgtactcaggaaataatgcaacttttgctgaaggattcagcgtttgagacatcctcgaaatgggcttctggtcctgaagttttgccatagatttagactggaaagtgcagaatttttcaagtatatccttcaagaacattactatgcatcccgtgactgtgtgagtaagggtatctttttcagcttggttgcttctttttaactcagagctgatttagccatatctaaattgctgggcctcattctgctaatacataatcttcatcttctaaggcagttctgcaaactgaccttgagggaagcttcaagcaaacttcatttgcttatttgagggtgctttttattattatccctgtgcaagatctctctctctctttcttttggtgcaagaaattctgatgatttcttttcaaaatttgcatgattggtttttaaatgtccatcaggaacaatgcagggacagcttaggggttgcatgcaggcaaggtaccaagatttaggctcatttgcatctgcaaaataatgaaaaccagattcccaataagcatgtaaatggaggctgaaatatttagtcaggctgcaccggccgtggtgtggcaggtgccacctgggatcggaagcagacaggtgtctctcgggcttggctattatctgtgccactcaatgatgtcaggtggatctgaatttctctaattgcgttttctaaaattcactgtgttcacacttaggattggacattcctgtttttatttatgttgacatgttcccagatggacacatgattgaaaatcagcactgggagactggctgctgagggtgacatgccagtgcccagggagggcaaaacctgctccgttgacggtggcttggggagggcgtggttgcatttgtactccatatttccttgtgctgcgcaagcttaaataagcccttcagtaggtgctggacaaagagcggggatggcctaaggaaaacgcgcagaaaaagagtgcaggagccacttggcaaacaggtgaaaatcctctcctttctggggcagaggttttctccgtttcccccacatatctgcctgattctgccacaggcaggcccttcagagagctctcccactccagcaagggaggctgactcaaagacctggtgttctgcaggcccagcatgaggctggcggtgattcggaaacccacccccccgcttcccgctgttcctgtgaaaggccaggagtcgcctcctgtcagtgtgtccttcacaaaaccctcccaagaccactcccggggctttctagggcacctcgcagctgccaagggactcttcatccttgcagctggctgtgtgccaggcagcccgggcaggccccaggtaacgtggggaagtagaggcttggggaggctcgggtctctgaggacatctgggctgtggggaatcctggtgcgaagccggcccagtactcgcggagtaacctggcagcctctggagggtgtggagggcccggggccctgggttccgaagacccgctctggccacgtgaccttggcgccccccgcccctcctcgcccacctggctcttcctcagcatcgcctcctgtgggcggccaggtgggcaggtgggcaggtgggcggccaggtgggcaggtggggcctcttgggtgagcccaacactagtgattctgttttcagaactccttcagacaccgctgtgaaaacagcaccatcacacaatcacgaattcacatcaggacctggcctattgctatatgcagagagatgctgaaacctttcattttttctttttaaaatcgtaggactttgcccattaaatcctaaattgccactagccaacatggatgaagtctgcgagggatggcaccgccgggcacacctgtgtctggcctggtggtgggaaggaggtggagggcccccgggaagggggttcttaccgctgaggagaggccggttgtgccggtaggaggcgggcagctggccgacaccctccatgcggtggctcatgacgcgtgcgaggtggcccgtgtggtgcaggctgcccaccacgatgctctgcaggtacacgggctccacgaagtgggacaggagcgcgccctgcagccccaggacgttccacctgtggggagagccagcagtcagcggagccccacccaggagcccagggagcctggtcctctctgtccgtctgcggcctggtcctgaggacctgtcagtcttcccatcgtgcggaccttggggagctccctgggagtgccccagacccaacccagccatcactggggctctggggacactgttgcctgggactgggctccacaggcccatgtgtgctaacaaatgctgctctcttttctgaaaatgagtcgttagagtggaaactgttatgttctctgtgggacttagaattagatttttttaaaaagatactctgtcccaaaagtgaatctgaatttttctttatattagctgggaaatactataaatggaatttgtttattttagtttagggaaaaatacttagtactccctttgtccttagcagtcaaaatgacctattgtgttgaaattacattaacaaatgaccttgttttggtctgggcatgattttggtttcagaagcccagattggagatgaacaacaaggccattttgtttgaaataaatatagctctgggtgaatgtttttgcttcctcaagcaaaaatgccaagagcactgacattttttccccttaaatttgggtggcaagaggttccatgtgtgtgttttttgaagcaacattctatggtttccactctaaataatgtgcttaaaatcctacctccttcagcagcaagcgttacgtagctaatttcttacatcattgttcttttcattaattaacatttctccactgttagagcaattactgccatccccgcatgcagcgtctcttttcatgattaataaggagtcattacatttcccttcccgaagcagtcaattaacacaggattctttccattaattaccgaatctacctggagagtaatcttctccgagaacccgtgataccaattgctttaaaaagttctctttaaattttattccaaaaacacaagcaatttagccagcgatattaatttgcctcagaagcatctccatgaatgagaaacatcttttaatctcatgcaagaaaaggcagccatctggctggtgggggtttcggggagccgctctccctctctccctctgcaaatgcaggtcattaaagtaatgtgctcatctacataaaactcaaatggaatataaaaggtaatatttatatacaaacaatttagtcctacaatttaaacagtcattgattttatgaaacatttacttcagtctatcagatttgcataacttcatttaaaaaaatattgtggtcatttctacaagtcacggtgcttctcccagaaagcaagggaagggctggccactggatgtgcgagcttctaccagaggggtgaggtcgggcgctctgaagggtaggatgagatggaggccacagagcgcctgtcaccgaggaccttcattccacagagtgtctgcctggatctcggatggtcgtaagccacagagcacctgtcactgaggaccttcattccacagcatgtctgcctggatgtcggatggtcggaggacacacagcgcctgtcaccgaggaccttcattccacagcgtgtctgcctggatctcggatggtgggaggacacacagcgcctgtcactgaggaccttcattccacagcgtgtctgcctggatctcggatggtgggaggacacacagcgcctgtcactgaggacccttcattccacagcgtgtctgcctggatctcggatggtgggaggacacacagcgcctgtcaccgaggaccttcattccacagattccacagtgtgtctccctggatcttggatggtggctcttcagagtcaatcttttccttgatgttcaccgataagtcagagaatggcaacaaatcctgggaaaggagattttttgtaactgagcttttccttcagggaacaatgggaagtgttttctgtttgtttgttttgtttttttttcaatagagacatggttttgccatattgcccaggttggtcttgaactcctgggctcaagcgatcctcccacctcagcctccttaagtgctgggattacaagtgtgagccactgcacctggtctttgtgtgtgtgtgtgttttttttagacagggtctcactctgtcacccaggctggagtatggtggtgcaagtggtgcagccatagctcaccgcagcctaattattttgtattttttcatagaggcagagtcttcctatgttgcccaggctggtctcgaactcctgggctcaagccatccactgaacttggcctcccaccgtgctggaaccacaggtgtgagtcaccgtgtccggccaaggctgacatttttgaggagcggttgagggatttggcttcttcccttgactctgagaccagaggacagaccaaaggctgggaggaaattcagcagtgtggccctcctcgggacgtaagatgcccgttctcagatttggagatgccagaaaacaaggcccaggaaaggaccccgtgcagggcccagggctccgggtactgtggtcccagtgggcctgttaattctcagactgttagtgcgtcttaaaatgtcttataaagcagggaaaggtacatttccgccatctgtaacaaagcaccttcgtgaaataagccacgagttaaaaagtaaaattgggattcctggaagagacgcctccgtgttagaggccgtcagagcacgggctttgaacaaaacttccggaacgtatgtgagtggctgtgatgctgcaggaccgtcggaagacaaataacttctctatctggttcctacctaataacctttacaataaagaggaaatcaaccttctctttgcctggctaccagagattaaacttactctgctaagatgatcaataaaaccaaatgtctttctgaatatgagctggagaattttcagcattcaggattgaatggaaaaatgcctctccttttgttcaaacagctgatattactgcaatgttgacagaaaaaaaacccatgtctagttttcaatatagataatccctaaataaatatatttttgtctctttgtcagtcattgaaataccacagataagtggggaaggtcttggaaaaaggctgccattctttagccaggagatgcaacctgctcactgagtccaggctgcagcctccaggccacaatggaaggaaagacaggtctccggtgggttgacgacacctcaggctgtccctgcaggtgcgccggcatcaggcagggaacaggaccgcccttgcctgttttggacgctttggttttccgccgtgacgcggccctgtgaggagaagtaactctctaaagttacatgaagcctgcagcaaagtcctcagctgccacccgtcccggcgtctgcagctctgcagggctggctgtcaggcctgctgctgggatcatctgggagctttgaggatctccagaggtctggctcccccaaggattttggtgtgactggggagtcagtgcggccatcagctttctcggtgccgcccacgtgattctcctgtgagccagggttgaagacttctgcagcaaagcggcacatttggagccaacacagtcaggtaccagttaggtcgtgatgctggtcagtggggcctcccttgaccgttctcttgctgctctgagcgactgtcttctcagtggacctcaaagtgggatgtctgggccagccatggagcatcacctgagaagttgatagaaatgcagattcctggctgcaccccggagctgctggctcttgaactctggggtgaggcccggcagtgcaagttctaaggaggctccaggtggctctgaggctgctcagttcgagaaccaccgtctccgtgttggttctggggtcacagtaactgtatctacctttcacggcattggaagagcacaggggacagttgaatctctggccagtctgggggtgacatttcccttcctccacaccctacctccaaaccctgtctcacaccttcttcctcccaccttttgacaagacaggtaataagtctgagacgtctctgcatacaggccccaccccatttccaggccactcagacctattctgggggcctttcaaggtgaaatagaagccaacagccttttgactcaataacacacctgctaggaattcacccagcatctgcattctcaatggaacgcctgatatatggatggggccagtcttgaaggggctgtttgtaattgcaaagcagacaaagcacggcaaagcagaaatgggaaatcacctgagtgcgtcttaacagggaactggttacataaatgatggtgcattattgacaccctggcctgcctgaccatgggtcccacagctctcgtgcctctgaagcgggcctggcttgctgggacaccctcagggccaggaggccacagctgccccacctgcaccttctgtcgcgtggacgctccgcccctcactggctcctgccggcctcacccgtcacattgtgtaggacgcttgtgactgctctaaaaccacagggctttcaagctgtcccctccaaggtcccctcctgtgtccagcaccatcgtgactgcctcctgccgggctgcccctgcctggccctcaggtgcctgtggtttaaatctcctggcattgctgagcacgggtctggtgtgcagatggaggtgactgatgcgtaggaggaagctgatggacagttcgtcccttcgccagcagctgtgttgtgttcaaaggtggaaacaaaccagctaggctctcagtgaccccacccaacaggcatttcctcaacgtgactgtgacatccacagggtgggcctgcacctgccttgagcctctgcagcttgggatgcctcagcctgaggtgctgggatgatgccacctgggactgggtcccctgacctcctgggttctcccttaggtcccggccgccattctgcagagactcctgagtccgtgaagtggatccagggcctccaaccgccccagctgatctgccaggaaaggggtccctgctgcccgggggctgcctcggctggcgccacgtggagatgaagtgagccaacccccgagctcaaagggagggcttgggagtacacgagggccttgttgttttagggccacctaaaacaacaggttttaggtggccctagggttctgaggtgctttgcttcacagcaggagacaactcactggagcccgtggcacagcctgagggagacaactcacgggagcccgtggcacagcctgagggagacaactcactggagcccgtggcacagcctgagggagacaactcacgggagcccgtggcacagcctgaggggtctctgggttgcccacagcttccccaggagctcacacaggtcaggccaaggggaagggagcccagtgcacacccccaggctctgcggtccgaatgcttgtgttcccaaaaattcacatggaatcctcacctcccagagtgctccccagccccttccaccatgggaggacgcggcacagggtgccgttaccacctgggaagcacagcctcaccagacgcggaaactgctggagcagagaccttggcttccagcctccagcgccaagaggagcggattcctgtcgtgggccagcgtgttctgcgtggtggccgggatggaccgagactgggtagatgccatcctgactgctgacgtttgggacgtgagacatctgggggcatggggcagcccgctgcggccaggtggggtcatggggcagcccactggggtcaggtggaggtcacggggcagcccgctggggtcaggtggggtcacggggcagcccgttggggtcaggtgggtgtcacggggcagcccgctggggtcaggtggttcacggggcagctgggctcaggtggggtgggtgggatattcagccgcttccgattattttcagtaaattacttccaggccacacatatctcatttctcttctgaaaaacccgtctcaaaaactccctttctcttgatatttctctggccaagtctaccctgcaacacgctggtaaaatgtaaaattccttcgcacgagagtgaagaggatgatccccaggtgcgtctctccattcccgggtcctaacgattcctccttaagccggctacctgcgcgggggccacgctctcccactgggaggatggtttctgggacatgcggcgtctcctccttgtgcctgtgcgtctgagagaactggggcgtctccttgaactgggacgtctcctcctcgtgcctgtgtggtctgagagaactggggcgtctcctccaactggggcgtctcctcctcgtgcctgtgcgtctgagagaactgcggggtctcctcctcgtgcctgtgtggtctgagagaactgcggggtctcctcctcgtgcctgtgcggtctgagagaactgcggtggccccttgtgggcctcttggttctggggacagaggacacttttcactcagcccggggacctttggttctttctgtgaagatggcgcccatgagatgacgccttgtgactcaggtacctcagccctgcgcctccgtctctgcgtctctgtattgggttggtggcgtccacactgtctgcgtcgttgctgagcatcccaggtccccactcagcccggcctcgtgttttctcttgtcctcctgactggagttccagttcttaccttgcagatggtgcgcttgtcaccctctgccgtctccacagcatctgggccgggtccccccaggaactgggctctggtctcaggagctgtggccgaggtcggtggtgctggtgcaggagggcagagccgcgaaggcagcggggctgctgattgtttcattattactttttatatttgataagtgttagtgaattgatcactgcttctttcctcactagaggtgttatgtcacttaaggccgggcgcggtggctcacccctgtaatcccagcactttgggaggctgaggcgggtggatcacttgaggtcaggagtttgagaccagcctggccaacgtggcgaaaccctgtctctactaaaaatacaaaaattagccgggaatggtggtgtacgcctgtaatcccagctactcgggaggctaaggcagagaattgcttgaacctgggaggcagaggctgcagtgagccgggatcacgccatgcactctagcctgggtgacaagagcaagacttcatctcaatctgtacaattttactcttttaaaaggagtaaaaatatttttaaaccagactgggggaacttggggttcggtgtttaaaagcagttctgttaggaaggacctacactctgagattagaacaatgaacatcactcatttgacctcagtggagtcaacaaatcatggaggaaggcgtcagaattgttcccaggtgggctgcgtggccaagaggaggcacgagaagctgttgttgagggaacattgagcagctgatctctaggtggggggagacggcactctgcacaggctaaaatttaggtttagaaatcagccagtgccgtattccccagagagcagctgtaatttcttatggttcattttcatggagaaagttttaatctgttcatttaaagacacattgtgatcaataatcaagctcaggtacttaaaattagaaaccatatctgaaggaacattagttccaggagatttagattttttatatgccgctcaatgtttgattaatcttagagacaaaagctaaaagcacctctgcagttttcctcattcttttaggagcctggggtttggctgttggtgagagtctagcctggctccatagagctggaaaaacaggccgcgtccacaggccttcaggatgggactgttaggcctgcggtgtccgaccctcttcccatgcaggggcagggtttggtctccagggcactcctaaccttaccttgtggctttgcaggtcaattcttattgacctgtgactaccactttctgcagttccatcccatcttcccagggctatggtggtggtaggattttaggaatcgagtttactgtgactttatctgttctctgatttcctgaagaccggataggtgatttctctcacctgccagtgccagcctcctagggctgctgtgggacaaccacagtggggtggcttgaaacagggatgttcccccagttctggaggccagagtctgaaaaggtgtctgcagggtcgtgctttccctgggtgcgtgtggctggtgccaccccccggggtccctgtcctccaagcacccactggctctgaggtcacagaggaggccaaggacacctgggtgtgtctgtccctggccccagcactcaggtgcaggcagccgggccccatgctgggctctgtccctgcctcccattctctcacctccctgcttccccagcccctttgcatcagcacgaggccctgggcggactgaggtgcctcagggacatgggactctagagcgtcctctcatggcctggacccccagtgggcctggctgcacatcaggccgtttcctctgggctggtcttagccaccaggcagcacccatgggctcttaagtggtcatgtaattatcaagtcagtcgtgtttgctgagcccctgagatgtgaggacacagttctaagtgccacagggagggcctggttcctgccctctgggagggcctgatttgtcgggggagacaagatggtcacagaccattggcccaggaagaggggcttctgagcaggggcttggcccacagctttctctgctggggcgcccggagcctgatgagtggtcggtgctgtcagggcactgaggcaggtggggtgggggttctgcccagtaaacaggctcagggtatcctcttgtggttcatcgtgggtccccagataccacggtggatttcagatgcagtgaggggcgtgtggctgccaatacccccagatccttctgaatggcggagaacattaggtgtgcattgtgggagacacacaggatggagacaaacgactcgttcagtgatccccagagcaacgctgagggcgcctgagagggaatcacaaccccatcagcacagggtgacctgcctcagcccttaggtgtggggatggctgcactatcactgacacccacacccatgcccacgcctacaccatcacccatgcccacacctacagcctcgcccacacccacgccatcacccacacccatgcccatgcctacaccgtcacccatgcccacacctacagcctcacccacacccacactatcacctacagcaacaccgtcacccatgcccacacctacagcctggcccacacccacaccatcacccacacccatgcccatgcctacactgtcgcccatgcctacactgtcacccatgcccacacctacagcctcgcccacacccatgccatcacccacacccacatcatcacccacactctcaccatcacccacacccatgaccacgcctacaccatcacccacacccacatccacactcatgcccatgcctgcaccgtcacccacactcacatccacacccacaccatcacccatgcccacacctacagcttggcccacacccacacacccacaccacactgtcatccacaccctttcccaacttgagtgctctcctgtgccctggtgcactgaatgactgtggccacaggaggccagaagcccacacagaggacggaggggacatcagatgatgtgtaaggaaatgtgacaaaaggtttctccacaatgttttacggctcattctaagccactggaaaaatttcaagatttctatcacacactttcatattttgctgtaaactgatcttaccactgacattgtgaagtgaaatctattattattcatggaattccgtacccagaagaaggtctgctgtcacccaagaatatcactatgggtattattggtcctaaaggtgatgcctgtgcattacttttgatctgtaggtgggaagtaatgtagctgtgttgtttgtttggatcttttgatacaaaagatcatttttcattgatatcaaagggaaattgcaaagagaatgacctatttgtctggcggacacactttctgtaccttaatgatacatacaattctatccatttattctcattttaatacatgaaagtggcacgaagtcggagatcaaaagccagccagacattaatctcatggctgctcaaacagaactgcgtctattcccagagaaatttctaaacgaagaagcaaatatgaccacgggttcccggcctcgtgtgggatgagactcgtgctgtctaggagagaaaatctgtaggtttcactggttttagcacatccctaaaatgtatgagcagcacacatacctctggagccctggccaaagttagtggctgagcagaagacacgtgcttcgcctccataaagtcgtctgcgtggcacgtcagaagcctgcagtcctttcaacttccagttcccagggcatcatcaatcacgtcgcagcgattcctatttcacgtcatggccattctgacaaaacagcaggtttccttcgctcatgagtgcagtgagcggttcctggatgctgaccgtgtggagcactttgtacctcgtgggggtgtaaagaagcctggcaggaagcctggcaggtgggcctcaggcagatggaaaggtggggacagttggaagcagccccttcccgcgctggggcctccccgtggtgtagacgtctcctcgggacgagtctcagtggagccatcatagccaagtcagccggtgcttgaaggctgctgcagctagcacctgggcaacgcggaggctgtacttgccagcctgtgccagggaggctctgggcactctccctgccagcccaccaaggtgttgccaatggcgctgtgaggggttcaaaacccttgtcctctcctgctgtggctcagcctcccatcgctccctccctccctccctcctatctatcttctatcatctgtcgatcagtcatctaatctataatctatcatctatctaatctatgatctatcatctaattttcatctatcatctatcattatcatctatcatctacctatcatctgtcatctattatctgtcatctgttatcatctatcatctattaactatcatctgatctataatctatgtatcatctgtcatcttcatctatctgtcatttattgttctatgtatgcctgctatgtgctgtatcatctatctgtcatctctatccatctatctgtctgtcatctatcgatctatgtatgcctgctatgttcctgcacccactgtgccagacactgaatgcatgacgtggaatgagacaaggtccccacctgccagaagcttagagtttggtgggaagcatggattctaaggagggtgagggcctcccgggttcagacagtggactcccagcagcctcaaatatgttatttctggacgagaccatggtatgctgctcacagtcagctctcgaaagaaagaaacaatcacgtgtgtagctttccaatttccatggtgtaagcaccatcactgtggccaatttcaagggcccagtgtgaggtcactgagcaggtttgggcagcgatgaaggggtttggaaaacagcaggattttgtggtatttccaccacacagatataagaggtgtaaataatttcaagagcacaaataacagtaaaataatttggagtggtgagttttgagtacctgttacctttgttttactatatttagttctaagtttatgtaatttagtttttaataatgacttatttgacaaccacctttcaaaactgcctgcacatctcaccatggccctcaggatgacgctggctcctgtgcatcctgcgccgggcatggtgcctcacgtgaggtcatttccacggccacgtgtgtcctcctgccgcttcacagacggtgacttccacctccatgtcctcagactccactctccacagagccctgactgtcattaactccctgacttagaatatttcatccgtatttgtgtatgaagggtcctttatgttgaatgttatttaagccctaggtttaatttttgtttttgtgcaggatagaaaacagatgaacacatacgttatcagatggtctctctgtacaaataatgcacggcccagatgcttatggtctggaatcattagcataacatatgctgctgctcagaaacggcaagtgcggcgcaattctgaaacagctcctgccttagcaggtacatcctggtctatgctcaggtctgattttggcagatacacaagtaccttcttgccaaaggctgtgtccccatgtcactgcttgtgcctggcccagagcagaggctccgagtggtggcaccacttctgtcattgtcgggaccatggctgcccctcctccccctcctgctaaaccaacaagggctgttgactgagggcccccgagggccactgagtgcaccccacagtggcaggcaccctgcaaccaagtgtccctgagtccaccccaccatggcagacaccctgcagctgagaggccctgagtgcacctcactgtggcaggcaccctgcagccaagtggccctgagtccacctcaccgtggcaggcaccctgcagccaagtggccctgagtccaccccaccgtggcaggcaccctgcagctgagaggccctgagtgcacctcactgtggcaggcaccctgcagccaagcggccctgagtccaacccaccgtggcaggcaccctgcagccaagcggcactgatgagcccttggaggtcagaactcagacgcagaagcagacagtacctggaactgaacccctgcaagctccatgcagagaacagcgtggcagcactcgaggagggaaaggctttggggaagagggagggaggcagaaggagcagctcagggagctcatcaatgagggagggtgagtggagcagagatgaagagatgagatacacacagccagggaggaggatgagatggagagggagagacagagacacagaaagacagagacaagcagacaaggacagagataaaaagacaaagagagacagagatgggcacacagagaaagagacagagagacaaggacagagatggagacaaagctagagacagacagggagagagatacagagagacagagggagagacatagagacagacgcagagacagagagaggccgagagcgagaggaggagggagaagagatgatggggacaaggggaagccaagtctaagacaggagagaaccagtaccagaaccagaaggtggctgggcttcgaggggcctgggccagtggctaggggcatttcaagccttgcctgtgcccccacacctgggcacccccctgtccactgcacccctgtcctgtcaccagactcggggatgaagcacttgtgaatggagagagaggacgcaactctgttctaacccggcaggtgcttaggattaattcctggacaaattcaggaattctcactctagctgcccagagccacgggtgtgacaatttccacaaacttgtattctgttttcaaaaggagtctagaatcacccccaaatcccggacactgaaagcccctggccaggaagcagtgtagacctttgtttttcaaggagattttgttacagagagacaaccctgccccttgagtggccactgagtgcttggacctgccagcgttgtgtgggtttgcatctgtgtccagcatctcgtgggtttgcacctgtgcccggacctgccagtgttgcgtgggtttgcacctgtgcccagacctgctggcatcgcgtgggtttgcacgtgtccagcatcatgtaggtttgtacctgtgcccagacctggcattgcgtgggttcgcacctgtgtccagcgttgtgtagctttgcacctgtacccggacctgccggtgacacataggtttgcacctgtgtccagcatcgtgtaggtttgcacctgtgtccagcgtcatgtaggtttgcacctgtgtccagcgtagtgtaggtttgcacctgtgcccggacctgctggcgttgcatgggtttgcacctgtgtccagcatcgtgtaggtttgcacctgtgcctggacctgccagcgttgcatgggtttgcccctgtgcctggaccttctggcgttgtgtaggtttgcacctgtacccagcgtcacgtgggtttgcacctgtgcctggacctgccggcgtcgcatgggtttgcacctgtgcctggacctgccagcgttgcgtgggtttgcccctgtgcctggaccttctggcgttgtgtaggtttgcacctgtacccagcgttgcgtgggtttgcccctgtgcctggaccttctggcgttgtgtaggtttgcacctgtacccagcgtcgcgtgggtttgcacctgtgcctggacctgccggcgtcgcgtgggttcgcacctgtgtttagtccaccatctatggatgttgaagatcccagggacggccaagtttcaattctgtaggtgctaatttacttcatttttctggggcaccagagagtaaatttagaaacccaatgctatcttagggcaccaagagaatttcagttgaggtgaaaattactgctttttcctcatcatgaatagatgaaaacattgtaaaggaagaatacattttcttttgaagaatgagctatttgtcgacaatgggctgttccctttgatgcagaaaccacggctttggtccactgtcattaggctgaccctgtggctccccagccaggagtgcccagagccaggaaggaaagggcaccattttccccagctctcccacgatttccatgagaaggtggaaccattgttgttagggctggggtttcatctgcctggagtccagaagccggtctgtgtagatcccggggagcagagctgtaggggcctgcaggggcgggggcaggtgcggcgggggtctcccgttttctcctgggccctgtgtcccctgatgtcacccccctgacctccagccccttgggttttgtggacgggccagggcccagcactcgggcttaggatgggtaaacagttgtcctgttatctgttgggcatatggcaggtgcctgtcccatgcaggcactgcctgccccatgggcatctgtctgtgctagaacccctgggtggctgcgttttgaagaggattttacgggggctggctgtgcgcaccctctcccttctctccgttctctccccagatcgtgctgtggttgtagggagcccaggaccccatgggcacaaaagcctccatgcaagcatcagaggtgatgccccgggtcctgctcaggccttcggcttcctggccctccccactcagcctccttcctgcacatcctggggaccaacctttgcatctcctgcctggctccaccacaaaacgtccttacagagggtctcagggccacagcctcgttgggagttgggggtggcacccggagaccacatttgcaccaaatgcgctgttttcactccagctgcagatgacagaggaacaggacgaccagagtgtccaagggtgttctgggtccctcaacccagacttcctgtgaccacattgttgttagtttatcaggcttgtggggaattcatggctcttttagggaaactcatgctgtccccacacctgtgacccctattttccaaaccaaagttacagaaatgtcctgcattggggatggcgctttcagggcgtcagaccaatgtgggggaggtctaggggcttcagatcaacgttggggaggtcttagggcctcagatccacgttggggaggcctcagggcctcaaatccacgttggggaggcctcagggcatcagagcaacgtgggggaggcctcggggcctcagagcaacgtgggggaggtctcagggtgtcaccaacgtgggggtgtcaccaacgtgggggaggtctcggggtcagatcgaggacggagaggtcttgggacattagaccaaggttgggggaagtctcagggcatcagactaacctgggggaggtcttggggcatcagactgaggttgggggaggtcttagggtatcagactgaggtcaaggaggtctcggggcatcagaccgaggttgggggaggtctcggggcatcaggccaaggtagggggaggtctcaacgcgtcagaccaaggttgggggaggtcttgggcagagcagctcaggagcttggggcgtggcagcgactggaggtgctgggagggaggcgggtgcccattctgcagcttcctgctcctctgcacagagctcagccgaggcctctcatcccgagacctccacatggaggctttgaaaactccatccaagaagacaatatctcgggatggtaggggaaaggtgttccacccagctgacctcaaggcctttggctgtccctggacattagtcaggtttttgtggaaagcccagtggggagggaggccctggcttctcgttagcctatggccaccccgactggccggcagcctcaggccaggctgtgtttgccccatgcagccacagcctggggttgccgggccttgctcggggctgtttgcctctgcagcggcagcctcgggtggcagggccttgctccctcagggactcggggtgccttggcctcagggtgtgggactgaacatgtggaatggctgtggagttccacggctcaggcacagggccctgaccgcatgtgcccagcatcactgacctcaccagaagtgggatgcagggagcctggggcttggcactccccaccggccgcagccaacatcctcgagaggaagccgtgggcctcacctggcgatcttgtccgtgcaggacatggtgatcagctgctcccccagcaggacgccgtcccaggtctgcactgcgctggggccacgcacggggaccgtcccttccccggactcgatcttggtgcgcaggtgcccgcggaacttcctgacgaggtgtttgctgctgtgcactaggagataaaagggcggggaggggtgagaagagggaagccgccttggttttgggaggtgggagaagaggaaggactgcaacagaggtcaaagggcccctcaccatggctgggcgtttggcacgaggaaggggcttcagaaataagcgccatgtggggttgggctccagagccacaccatcccgcctgggccgggccaacttcccagtcaagggtcagggagtaaaaaccccaggcttcatgggccagactctcttttcaccaacacccgcctctgttgcgtgagtgcagccacggcctggaccgtgctcaggccagtaaggggccaccgcgtcctcaatgcttcatttacagatgcagacttgaacacgcagttggacgtgtcgttttcagaggttgtgaaacaccgtttttctcacttttcagccattaaaaatgtaaatatttatgcttagctggagggctgtgcagaaataggtggtgagtgggactcagctcttaccctggtccaggtgtcagtcccggctccatggtaagctggctgtgtaaccttgggaaagtgtctcaaagtcactgtgacccggttacttcctctaatgacgagggtaatagcagtgcttgccgcccaggctgtgaggagtcggtgaggtggctcctgtgaaggtgctggggttgcctgggcacctccactcttgctgtgtcccctaattaccaagggtcgccatgggcaggagctccgccaggcccagaagtgacggagcgtctggtgggtctctgtgggtccctcaggtgttctgtgttctcctttctagggtccccttgacaccccccgcccccctataccacattccccacaattacttggagaactagcatgagcaagaggaagcttaaatttatgtttctctttctttgaaaaaattttgtatgtttttgttttgttttgtttgagatggagtctcgctctcttacccaggctggagtgcagtggcgcaatctcagctcactgcaacctccgcctcccaggttcaagagattctcctgcctcagcctcctgagtagctgggattacaagtgctcatcaccacacccagctaatttttgtattttcagtagagatggggtttcgccatgttggctaggctggtctcgaactcctgacctcaggtgatccgcccacctccgcctcccaaagtgctgggattacaggcctgagccactgcacccagccaaaatcttgtacattaaatctggattatattgtaatatggaaatggcccactgctttgcatttgaattatatataaaatagtatagtgattatatcatttacatacatatgataacgtaagtgaatattaaatgctttctttagaaagttcctattgaagttttagaagctgtggaaatgcaatttccccctcactttcccccactgacagtgcttgatatggctgggatccgtgtccccactgaaatccatgttgacatgtaatccccagtgtcggaggtggaatttggtgggagatgactggatcatggggcggatttctcatgcccagtttactaccgtccccttggtgctgtcctcgtggcagtgaattgttctcatgagacctggtcatttaaaagtgtgtggcatcagccgggcacggtggctcacgcctgtaatcccagcactttgggaggcagaggcgggcggatcacgaggtcaggagattgagatcatcttggctaacacagtgaaaccccatctctactaaaaatacaaaaaaaaaaaattagccgggcgtggtggcgggcgcctgtagtcccagctactcgggaggctgaggcaggagaatggcctgaacccaggaggtggagcttgcagtgagccgagattgtgccactgtactccagcctgggcgacagagcaagactacgtctcaaaaaaaaaaaaaaaaaaaagagtgtgtggcatctcccccgccctctcactcctgctctggccatgtcactttctgccatgattgtgagcttcctgaggcctccccagaagccaagcagatgccagtatcatgcttcctgtatagcctgtggaacctcaagccaattaaacctcttttctttataaattacccagtctcaggtgtttctctagagcaatgtgagaatggactaatacagtgctgaatggtaactaatgcttgggtttatataggaactttctcctaaagatcccaagtaatttccagtgtattttctaattgtctgtaagagctgacattctttcactatacattcatagtacttaaggctatgccttgggaagaaagatcgctgcattctttggagaaaaaaccctttgagaggcttcagatggcttttcactttgtaaccaactagatacttgatgagataaaatttggaccggtctttgagtcattcacggaaaaaagagcgaatgagaggtattgagcctgggcaggcacagcaaataatgcccagctcttccccagataaagcacaaatctcttctttgcagctttaatggtgatggtgatgataatggtggtggtgatggtgataatggaggtaatggtggtggtgatggtgttaatggaggtgatggtgatggtgaagataatggtgatgatggtggcggtggagacggtgatatgatggtgaagataatgatggcaatggtgatgatggtgatggtaatgatggtggtgatgatgatggtgatggtgatgatgatggtaatggtggtggtgatgatggtgatggtgataatgatggtaatggtggtggcgatgatggtgatggtgatgatggtggtgataatggtgatggtggtggtgatggatgatggtgatggtggtgatgatggtgatgatgatggtaatggtgatggtgatgatggtggtgatgatggtaatggtgatggtggtggtggtgatgatggtgatggtgatgatggtggtaatggtgatggtggtggtggtgatgatggtgatgatggtgaagataatgatggcaatggtgatgatggtgatggtaatgatggtggtgatgatggtggtgatgatgatgatggtaatggtggtgatgatggtgatggtgatgatggtggtgataatggtggtggtggtgatgatggtggtgatgatggtaatggtgatggtggtggtgatggtggtgatggtggtaatggtgatggtggtggtgatggatgatggtgattgtggtgatgatggtgatgatgatggtgatggtggtggtgatgatggtgattgtggtggtgatgatggtcgtgatggtgatgatggtggtgatgataaattgaacataaaatagttcgtatgactcaaaacacttggtttaaactgactttttgcaggtggggtctttatgaacatcaactttctgcggaaggcaacattgaaagcatggaggagccatcacacctaacagtttccacaacattaccacaatattagggactttactctttcatttgggggatattttctcagggaatgtggttgttgctgtccctccatttctgttatagtattcttatattctcccaacgttttaactattgtggtctttttcgagatcttgaaagttgcctattatattgtaaggcctttctaaatttttaccagttgctactgcacaactaactttccatgaagtacacttgatagcctgttaatgccatgacaacagggaggccctgctttaattaacagctagttcctaggagttaacccaaagctttcaggttagactaattttgcctgaggagccaggtgcatgagttgctcctgagtgtttatttttggaggtgttcagtcttgggatgccttctccacaggctccctgatgagtttgagcagccccagggtggcttgaatgtcggtgatcctgcagagcccatttcctctggctctttcctggctaattgtgagaggtgggaaggagttgaagatgccacttaaggctgacaaaatgccagtccaaccagcaattgcagtgagctggccataaatgatctgtagtggatttagagtgtgcctgagacagtgaaagtgtagaacctcaaactcctgactgctgtgtctacatagatgctcacaaatccatccaaacattctggtccaattctgacagtccaagtcatcagactcttcattacagtgcttattaacctatataaaaccctagataaaacccttgtcttttgaggtcaatatcaaggtaaataaggatagtttttagatgctcatttcttttttttttttaattttattattattattatactttaagttttagggtacatgtgcacaacgtgcaggtttgttacatatgtatacatgtgccatgttggtgtgctgcacccagtaactcatcatttagcattaggtatatctcctaatgctatccctcccccctcaccccaccccaccacagtccccagtgtgtgatgttccccttcctgtgtccatgtgttctcattgttcaattcccatctatgagtgagaacatgcggtgtttggttttttgtccttgcgatagtttgctgagaatgatggtttccagtttcatccatgtccctacaaaggacatgaactcatcttttttttatggctgcatagtattccatggtgtatatgtgccacattttcttaatccagtctatcattgttggacatttaggttggttccaagtctttgctattgtgaacagtgccacaataaacatgtgtgcatatgtctttatagcagcatgatttataatcccttgggtatatacccagtaatgggattgctgggtcaaatggtatttccagttctagatccctgaggaatgaccacactgacttccacaatggttgaactagtttacagtcccaccaacagtgtaaaagtgttcctatttctccacatcctctccagcacctgttgtttcctgacattttactgattgccattctaactggtgtgagatggtatctcattgtggctttgatttgcatttctctgatggccagtgatgatgagcattttttcatgtgtcttttggctgcataaatgtctttttttgagaagtgtttgttcatatccttcgcccactttttgaatggggttgtttttttcttgtaaatttgtttgagttcattgtagattctggatattagccctttgtcagatgagtaggttgcaaaaaattttctcccattttgtagtttgcctgttcactctgatgttagtttcttttgctgtgcagaagctctttagtttaattagatcccatttgtcaatcttggcttttgttgccattgcttttggtgttttagacatgaagtccttgcccatgccaatgtcctgaatggtattgcctagattttcttctagggtttttatggttttaggtctaacatgtaagtctttaatccatcttgaattaatttttgtataaagtgtaaggaagggatccagtttcagctttctacatatggctagccagttttcccagcaccatttattaaatagggaatcctttccccattgcttgtttttgtcaggtttgtcaaagatcagatggttgtagatatgcggcattatttctgagggctctgttctgttccattggtctatatctctgttttggtaccagtaccatgctgttttggttactgtagccttgtagtatagtttgaagtcaggtagcatgatgcctccagctttgttcttttggcttaggattgacttggtgatgtgggctcttttttggttccatatgaactttaaagtagttttttccaattctgtgaagaaagtcattggtagcttgatggggatggtattgagtctataaattaccttgggcaatatggcctttttcacgatattgattcttcctgcccatgagcatgtattgttcttcgatttgtttgtgtcctcttttatttcattgagctgtggtttgtagttctccttgaagaggtccttcacatcccttgtaagttggattcctaggtattttattctctttgaagcaattgtgaatgggagttcactcatgatttggctctctgtttgtctgttattggtgtataagaatgcttgtgatttttgtacattgattttgtatcctgagactttgctgaagttgcttatcagcttgagggaattttgggctgagacgatggggttttctagatatacagtcatgtcatctgcaaacagggacaatttgacttcctctttttctaattgaataacctttatttccttctcctgcctgattgccctggccagaacttccaacactatgttgaataggagtggtgagagagggcatccctctcactgtcttgtgccagttttcaaagggaatgcttccagtttttgcccattcagtatgatattggctgtgggtttgtcatagatagctcttattattttcagatacgtcccatcaatacctaatttattgagagtttttaccatgaagggttgttgaattttgtcaaaggccttttctgcatctattgagataatcatgtggtttttgtctttggctctgtttatatgctggattacgtttattgattttcgtatgttgaaccagccttgcatcccagggatgaagcccacttgatcatggtggatgagctttttgatgtgctgctggattcgttttgcccgtattttattgagaatttttgcatcaatgctcatcaaggatattggtctaaaattctcttttttggttgtgtctctgccaggctttggtttcaggatgatgctggcctcgtaaaatgcgttagggaggattccctctttttctattgattggaatagtttcagaaggaatggtaccagctcctctttgtacctctggtagaattcggctgtgaaccccatctggtcctggactttttttggttggtaagctgttgatcattgcctcaatttcagagcctgttattggtatattcagagattcagcttcttccttgtttagtcttgggaggatgtatgtgtcgaggaatttatccatttcttctagattttctagtttatttgcatagaggtgtttgtagtattctctgatggtagtttgtatttctgtgggatcggtggtgatatcccctttatcattttttattgcatctctttgattcttctctcttttcttctttattagtcttgctagtggtctatcacattttgttgatcttttcaaaaaaacagctcctggattcattaattttttgaagggttttttgtgtctctatttccttcagttctgctctgattttagttatttcttgccttctgctagcttttgaatgtgtttgctcttgcttttctagttcttttaattgtgatgttagggtgtcaattttggatctttcctgctttctcttgtgggcatttagtgctataaatttccctctacacactgcttcgaatgtgtcccagagattctggtatgttgtgtctttgttcttattggtttcaaagaacatctttatttctgccttcatttcattatgtacccagtagtcattcaggagcaggttgttcagtttccacgtagttgagtggttttgagtgagtttctttctagtttgattgcactgtggtctgagagacagtttgttataatttcggttcttttacatttgctgaggagagctttacttccaattatgtggtcagttttggagtaggtgtggtgtggtgctgaaaaaaatgtatattctgttgatttggggtggagagttctgtagatgtctattaggtccacttggtgcagagctgagtttaattcctgggtatccttgttaactttctgtcttgttgatctgtctaattttgacagtggggtgttaaagtctcccattattattgtgtgggagtctaagtgtctttgtaggtctctaaggacttgctttatgaatctgggtgctcctgtattgggtgcatatatatttaggatagttagctcttcttgttgaattgatccctttaccattatgtaatggccttctttgtctcttttgatcttcgttggtttaaaggctgttttattagagactaggattgcaacccctgcctttttttgttttccatttgcttggtagatcttcctccatccctttgagcctatgtgtgtctctgcagctgagatgggtttcctgaatacagcacactgatgggtcttgactctttttccaatttgccagtctgtgccttttaattggagcatttagcccatttacatttaaggttagtattgttatgtgtgaatttgatcctgtcattatgatgttagctggttattttgctcattagttgatgcagtttcttcctagccttgatggtgtttacaatttggcatgtttttgcagtggctggtaccggttgttcctttccatgtttagtgcttccttcaggagttcttgtagggcaggcctggtggtgacaaaatctctcagcatttgcttgtctgtaaagtattttatttctccttcacttatgaagcttagtttggctggatatgaaattctgggttaaaattcttttctttaagaatgtcgaatgttggtccccactctcttctggcttgtagagtttctgccgagagatcagctgttagtctgatggggtccctttgtgggtaacccgacctttctctctggctgcccttaacattttttccttcatttcaactttggtgaatctgacaattatgtgtcttggagctgctcttctcgaggagtatctttgtggcgttctctgtatttcctgaatatgaatgttggcctgctttgctagattggggaagttctcctggataatatcctgcagagtgttttccaacttggttccattctccccatcactttcaggtacaccaatcagacgtagatttggtctttccacatagtcccatatttcttggaggctttcttcatttctttttattcttttttctctaaacttctcttcttgattcatttcattcatttgatcttccatcactgataccctttcttccagttgatcgcattggctactgaggcttctgcatttgtcatgtagctctcgtgccttgattttcagctccatcaggtcctttaaggacttctctgcattggttattcagttatccattcatctaattttttttcaaaacttttaacttctttgccattggttcgaatttcctcctgtagctcagagtagtttgatcgtctgaagccttcttctctgaactcatcaaagtcattctccatccagctttgttccattgctggtgaggcactccattcctttggaggaggagaggtgctctgatttttagagtttccagtttttctgctctgttttcttccccatctttgtacttttatctacctttggtctttgatgatggtgatgtacagatgggtttttggtgtggatgtcctttctgtttgttagttttccttctaacagtcaggaccctcagctgcaggtctgttggagtttgttagaggtccactccagaccctgtttgcctgggtatctgcagcggtggctgtagaacagcagatattggtgaaccgcagatgcttctgcctgatcgttcctctggaagttttgtcttagaggagtacccggctgtgtgaggtgtcagtctgcctctattgggggggtgcctcccagttaggctactcgggggtcaggtggaggcagtccacccgatctcagctctcaagctgcatgatgggagaaccactactctcttcaaagctgtcagagagggacatttaagtctgcagaggttactgctgtctttttgtttgtctgttccctgcccccagaggtggagcctatagaggcaggcaggcctccttaagctgtggtgggctccacccagtttgagcttccaggctgctttgtttatctaatcaaacaactaactcggcaatggcgggcgcccctcccccagcctcactgccgccttgcagtttgatctggactgctgtgctagcaatcagcgagactccgtgggtgtaggaccctccgagccaggtgtggaatataatctcctggtatgccattttttaagcctgttggaaaagtgcagaattagggtgggagtgacccgattttccaggtgctgtctgtcacccctttctttgactaggaaagggaattccatgaccccttgcgcttcccgggtgaggcgatgcctcgccctgtttcagctcaagcacggtgcactgcacccagtgtcctgcacctactgtctggcactccccagtgagatgaacccggtacctcagttggaaatgcagaaatcacctgtcttctgcgtcgctcacgctgggagctgtagaccggagctgttcctattcggccatcttggctcctccccctagatcctcatttctaaatgaggatgtgctttagaaaattgttcaagtgaatcttttatttttaggggagaatcaaaaggaattggagacaaacaacaagaggtttgtcccctggggagctaaagatttatctaaaaagcgatgcatggttgctaccatcacaagggggagagagagcaccaaaaatgaaacaaaccacaggcatgagaaaagaagaaaatatttttaaacaccaaataaattttagattttcaaactgtcttcaaaaggcatatcccagaaagtctgcctgtgaagcaacctagtattcattgtaataataatatccacagaagttaccatgtgtccacgtgggtgcactttgccatatttgattgatgatgatgatgatagtgatgatgctggattataaggccattaaaattcattatcctgcaatgcacggatattatcatattttgcatatttctgtaactcaatgggaaaatctgaagcaggaatttaaggaactgtattttatattccctgacttcctatgggattttcgttaaatctcttcaactacctttctagtcgttgaatggaattggcttagaacaaacgtactaggctcatagcatgtacttgtaggtaaatatatgacatcatctatttttcttggcattttctggacacagactggagaatttaagctgctaagttctcagaaaatggctgtaagaactgagtttaccaggttatttaaaaaccatgccaagaaagaagaatttgcaggcaggtcgttggtgggttgggaggagaggagctgctcaaccacagtgaagtacagagatcctcatcttctgctccatctgggctctttcagaactgcctgagttctatcccaggcctcccagggccactaaaggacccgtcgccctcgtgagtctgtgctgacagcagtcattggaaccctgactctaacatagacacacacagcatgttctcctggtgtgggaataaatgtctttcaggcatttgtccctgccttaactgacctggcccctctaggtccaggggaaagccacagatgtggcagttttgagtcgcttgagatgaatggagtagccctgggtcacatgacattgaagactgagtctgcggtctctgtcgcgaaagcagctttcccctcggtcgcatgcgatgcaccacgaacacttttcattcctgcctgtgatgccacagagcggggagtccagccataagctctgcctggcctctgcagacaggcaggctaccaggccgtccatgcctccaagccctttctacaaagccagcaaggaaacaaatgcccagtctgaagagatgatttaaggagttcaaacctgctggctcaaaacccgacctgtgctcagaaaactagagtcttggatgcccctctgccccgaatgcatcagaatctcggccagagtgcatggggtgagctgcattggtaaacactggcctgggaccctgatagataagccagagctggaaacaacaaacttgaatgccttccgaagctagcaggtgacacagctcccaaaatacctgagaccaattggcattgataccatgtctgaggcctccaggaatggggaatttatgatctagacaaatgtttttgaggggaaaaataaaatagggccatctagaatttctcgagccacatgcatcccaggaaagtggggctggatggcaaccccagggcccttgtgttgtgtctaagacttggagcccctgagcctgggcctcgggtggctggggcttggggaattcctggtcctgctgagctgttggagcaggttgctgccgggagccagctgctcagcagccaccagagagtcagaagtgtgctcctagaaaccccaagtcagactcacttctctcctgggcctttacatgatacttactatcatgattatttaaacctatctacagaaattttttcttatgccctactctgtgttccttcatttttaaaagaagggggaacaatcttgggcaccaaacttctttttgacttaatcacgtcatagttatattgatagatctgatgcatcagatacgtgtcgtgtgcttgtgtgtgcacatatgcttatgtatgtgtttgtgtgtgcacatgtgcttatgtatgcgtgttcatgtgtgcacttgtgcttgtttgtatgtgcacgtgattacatgtgtgcacatatgtgcttctgtgtacatgtgtttatgtgtgtgcgtgtacatgtacttatgtatgtttttgtgcacatgtgcttacgtgtgtgtgtgtgtgtgtgtgtgggtatatatgtgtgagaaagggagaagtctggcacagttgagagaggggctagcaggcgtggccactgtggagatgcacaatcgctcgatgcaggccaaaggggagactgaggaagggatgagctcaagtgaccaggaccaagcactgtgctggtgagaggagacatggcaggtccagaaggggccagaggcagagagcactcgagaagactgaaacctctgtgcagagtctccttcggtttcagatgagctcctctggcccccagcaaaggtctcggtggaggggactgagctctctgcactctgcggcctctgcatttgtgagaataacatcatggccctcagggcttcctttgttccctgggcttcttttgggaatgtggtcctctgaattggaggggcagtgccgctgggtttctgcagggttaatccataggagggaggcagtgccagctgcagacctctgggaacagtgcaaactggatgtgtccagctcccgccgccagcctttcctttgggggcttgtcaccatcgacactgcccttggctagccctggaggagcccctcacagcaaaagcctggccactggcatccccttatccatggtccaaccctctttaaagggtaacaaagacatacaccgcctgagttagcaacgtggagacccctgcctcttattgtaaaggagcttaaagcatctctctgcaggggaaatggcaggagttgttcctgaaggtctctgccttcctcaggcagttcaaaggatgcagagccagctctctgaagggtccttccaagcagagaacagcaggaacttgagttctcctgcctttactgagtgactttggcagatgagtccctgttataggagagttcaccaagtaccttccttctccacgctctccagatgggagagcggaggagtggcaccagcccaatgcagaggcacagcacaggcaggagtttctcaattttgcctggcatatctgctgcaaaaatgtgagaaaaatgctttattttttctcctaccagcacctgccacttcttaaaagcaccatgaaataaaagacatctgtgtctggaagtgaacctcagggtgcctcggagaacgtatttgtttttctaaagcacagacattgcagtagaaagtgagggctggctggagaggctgcagttggtgatcgatgtacagagatgtgggaggcccagtggactagaactgtcccctggggagaccacggggtctcaggcgtggacaaggctcctgctgttctcactcagccctctcccaactcccaccagggacatattagccaaggaagaggctggataactcagcaccaaccccaagcatttggcgggacttttcctctcaattctgagggttcctagctgggtctttacgatgccaaccctttaaagaagaatggaaagataattcccagtagctgtccaatggaccagatttcacaaaattcccaatagctgtgcagtgtaccagatttcacagttttatagggtgagctggtatcatgtagctctggcttgctgaatatgtccagtgaaaatgaagccactcctggtggtttttctgtctctctcttcctgagttggcctggtagtggggggtgccctgtgtgatcttgtggggccacactgggctcccttccctctggggagggctgtgtccacttctcaggtactcaggctgcccctgcctctctctccctactgcaggaagttcctttaaaagtccctgaggttgaacaggcttccttttcttcattcccagtttgacgggattctctcatttaatttccaaagggtgtggaaatactacccaaattcaaattcacttacagagaaccctatccagccatgccagaggatccacttacagagaaccgtatccagccatcccaaagggaaagcagtggggctggagggaagtccgcaaaaaggaggaggaatgtttctgggccagcatcccatgtgaggactgcagaatcaggctaagctcgtgtgagattaaagacaccattatccccacaccttcttgtctttggtggaggctgcatgacaagcctgacaacagcagggcataacaaaaatgcttaattttccttaccttggtaattaaaccaccatgtagccttccaccggaggagagtcaggccaaagccaagccttaatagctgtgtgctgtccatgtatgtctgccagagatttcctccctcatcaggactggactcctcatcatacacatatcacatacaccacacacaccacacacatagcacacacaccgcacacacaccgcacacatagcacacacaccacatacaccactgcattgcctgcattgaaagatctgcctggagctgcttctggaaagggtgtgggagcatgtgaatgtgtgtgcggtgtatgtgatatgcacgtggtgtatgtcgtatacatgtgtgttgtatatgctgtgtgtggtgtgtgtggtctgtgtgtggtgtgtgtggtatgcgtggtatgcatgtgcttgtggcatgtgtgtggtatatgtggtgtgtgtttgcagtgtatgtggtatgcatgtatggcatatatggcatgcgtgtagtgtacatgctatgcatgtgtatgtggtatgtgctgtgtgtgatgtgtggtatatgtggtatgtgtgtgtggtgtatgtgctatgtgtgtggtgtgtggtatgcatgtggtatatgtggtatgtgtttgtggtatatgatgtgtgtggtgtatgtggtctgtgtgtggtatatgtggtatgcatgtggtgcttgtgacgtgtgtggtatatgtggtgtgtgcagtgtatgtggtatgtgtgtagtgtatgtgacatgagtagtgtatgtggtatgtggtgtgtgtggtatatatggtatgtgtgtggtgtatgtggtttgtgtgtagtgatatgcatgtgctatatgtggtatgtgtgtggtatatgtggtatgcgtgtagtgtatgtggtgtgtgtgttgtatgtgtgtggtgtgtgtggtatacatgtgtggtatatgtggtgtgtgtgtggtgtatgtggtatatacatatatgtgtgtgacatatgcagatagcactaagcaataggatttcatcattaaaatgaaagagaggagtttccctgaagcaccttttcttttatcatggagttgctgatgtcaagggtggcttcaagggagagccccaccctgccccacgccctgccctccgaccctggcaatcgcagcatcactgccctttgctgatggagaggacagaggggcaggggctgcgtggatgcgttctgtctcacctccatcgataaatgctcacagggcgggtttgcagtggaactttatagttcacctggggaaacccctttgcagggaatcactcatccctggcttggttgcaaaagctgagcttttttcctccccaacgctgtgagcaaaggcaagcagagccagtgagaatttgctcccagcctgcgtaactctcactggccttcccttcattccattttcccagcccaggacacagggattgtctgagttattaaagcagagaactatggcaattaggtagctaattttaggcctcagactactcttctgccaatcacttgagcatttcagactaagattttggaggcatggttatcccactaattgtagactcaatccccttccagtacccaagggccccacacaccgcgcccctgccctgggctgtgaaagcccaggacagagtcccagatagagggagctgggggctgttggcctacagaaggtaaaagcatggtctcttacggtctgtggtgatctcgtagggagagtggagtcttgcgtctccacagggggaggtgctcacgtagagatggaagaggatgttctctcgcagccggtagccaccttcttttaaccgcacgaatatcgatcgctctgagtcctcgcgccgcttgctagggtcacaaagaggtttggggtcatttatcacaaaccaaaccagaaatgttccaaccaggtgaacgcttgagtcctgttttgtagagttgttccccaagttttcctttatatttttccttttttttttccttttttttttgagacggagtcttgttctgtcacccaggctggagtgcaatggtgccatatttgctcactgcaacctccacccactgagttcaagcaattcttctgccttgagtatcaagtgatactcagcctcccgagtagctgggattacaggcatgcgccaccacgcctagttcatttttgtatttttagtagatacagggtttcaccatgttggccaggtttgtcttgaactcccagcctcaggtgatccacccacctcagtctcccgaagtgctgggattacaggtgtgagccgctgcgcctggcccccaagtttctccttcttcacaccccatagtgtgtctttcccctgtaccaacacttctagaacaggcagcaatgaaactacgtgaatgcgaacatgactggcagaaaccctgctttcttacccccgccttgacatttacctgtcagggttattattattcttttctaaagataaggtcttgctctgttgctgctcatgctggagtgcagtagcgtgatcacggctcactgtagcctcagcttcctgggctcaagtgatcctcctgcctcagcctcccgagtagctgggactacaggtgcacaccaccatgcgaggctaatttatttacttttttttagagacagggtcttgctttgttgccccgagtggtctggaacttctgagctcaagcgatccacttgccccaggctccgaaagtgctgggattacaggtgcgagcgaccatgatctttttttttttttttttttttttttttttttgtgacggagtcttgctttgtcccaggctgcagtgcagtggtgcaatcttggctcactgcaacctctgcctcctgggttcaaacgattctcctgcctcagcctcctgagtagttgggattacaggtgcatgccaccatacccagctaatttttgtatttttagtagagatggttttgccatgttggccaggctggttttgaactcctgacttcaggtgatccacccgccttggccccccaaagagctgggattacaggcgagagccaccacactgggccccaccatgatcttttaccaagccattttttcccactgctgttcgcccacatctatctgtctacacacctgtgattctgtggatttgccagtgctgctcatggccatacctcacagtggactgtgggtttgacgtagcctgagtgggcagcttgtgtgtgattaaaaggaggaaaagagctgtaggaaggcctgggctccgtcaccagcacaggtgggagtggagaaccgtggcgaaacggctttccttctgcatccagccatgacccaggtggggcgggagagttcccagcctctctgatggtgaatgatttgcctgttgcaaaactcccaccagctgtgaagctggagctgagcagccccacctctgccccatcggagtgggcgctgaacgaacatgcctgcatttccttcttcggtgtttaccctctgtctcccggtgtttactcccctctccctcccggtgtttactcccctctgcctcccggtgtttactcccctctccctcccggtgtttactcccccctgcctcccggtgtttactcccctctgcctcccggtgtttactcccctctgcctcccggtgtttactcccctctgcctcccggtgtttactcccctctccctcccggtgtttactcccctctgcctcccggtgtttactccctgtgtcctggtgttactcccctgctttcaggtgatccacccgcctgggccccccaaagagctgggattacaggcgagagccaccacactgggccccaccatgatcttttaacaagccaatttttcccactgctgttcgcccacatctatctgtctacacacctgtgattctgtggatttgccagtgctgctcatggccatacctcacagtggactgtgggtttgacgtagcctgagtgggcagcttgtgtgtgattaaaaggaggaaaagagctgtaggaaggcctgggctccgtcaccagcacaggtgggagtggagaaccgtggcgaaacggctttccttctgcatccagccatgacccaggtggggcgggagagttcccagcctctctgatggtgaatgatttgcctgttgcaaaactcccaccagctgtgaagctggagctgagcagccccacctctgccccatcggagtgggcgctgaacgaacatgcctgcatttccttcttcggtgtttaccctctgtctcccggtgtttactcccctctccctcccggtgtttactcccctctgcctcccggtgtttactcccctctccctcccggtgtttactcccctctgcctcccggtgttcactcccccctgcctcccggtgttcactcccctctgcctcccggtgtttactccccctctgcctcccggtgtttactcccccctgcctccagccatgacccaggtggggcgggagagttcccagcctctctgatggtgaatgatttgcctgttgcaaaactcccaccagctgtgaagctggagctgagcagccccacctctgccccatcggagtgggcgctgaacgaacatgcctgcatttccttcttcggtgtttaccctctgtctcccggtgtttactcccctctccctcccggtgtttactcccctctgcctcccggtgtttactcccctctccctcccggtgtttactcccctctccctcccggtgtttactcccctctccctcccggtgtttactcccctctgcctcccggtgtttactcccctctgcctcccggtgtttactccccccctgcctcccggtgtttactcccctctccctcccggtgtttactcccctctccctcccggtgtttactcccctctgcctcccggtgtttactcccctctccctcccggtgtttactcccccctgcctcccggtgtttactcccctctgcctcccggtgtttactcccctctccctcccggtgtttactcccctctgcctcccggtgtttactcccctctgcctcccggtgttcactcccctctgcctcccggtgtttactcccctctgcctccggtggttaattccctcttgcctccggtggttaactcccccctgcctccggttgttaactcccccctgcctccgggtgttaactcccctctccctccgggtgttaactcccccctgcctccgggtgttaactcccctctccctccggtgtttactcccctctgcctcccggtgtttactcccctctgccctcccggtgtttactcccccctgcctcccggtgtttactcccctctccctcccggtgtttactcccccctgcctcccggtgtttactcccctctccctcccggtgtttactcccctctgcctcccggtgtttactcccctctccctcccggtgtttactcccctctccctcccggtgtttactcccctctgcctcccggtgttcactcccctctgcctcccggtgtttactcccctctgcctcccggtgtttactcccctctgcctcccggtgttcactcccccctgcctcccggtgtttactcccctctgcctcccggtgtttactcccccctgcctcccggtgtttactcccatctccctcccggtgtttactcccctctgcctcccggtgtttactcccccctgcctcccggtgtttactcccccctgcctcccggtgtttactcccctctccctcccggtgttcactcccctctgcctcccggtgtttactcccctctccctcccggtgtttactcccctctccctcccggtgtttactcccccctgcctcccggtgtttactcccctctccctcccggtgtttactcccctctgcctcccggtgtttactcccctctccctcccggtgtttactcccctctccctcccggtgtttactcccctctccctcccggtgtttactcccctctgcctcccggtgtttactcccctctgcctcccggtgtttactccccccctgcctcccggtgtttactcccctctccctcccggtgtttactcccctctgcctcccggtgtttactccctgcatcccggtgtttactcccctctccctcccggtgtttactcccccctccctcccggtgtttactcccctctccctcccggtgtttactcccctctgcctcccggtgtttactccctgcatcccggtgtttactcccctctgcctcccggtgtttactcccctctgcctcccggtgtttactcccctctccctcccggtgtttactcccctctccctcccggtgtttactcccccctgcctcccggtgtttactcccctctccctcccggtgtttactcccctctgcctcccggtgtttactccctgcatcccggtgtttactcccctctccctcccggtgtttactcccctctccctcccggtgtttactcccctcttcctcccggtgtttactcccctctgcctcccggtgttcactccccctctccctcccggtgtttactcccctctgcctcccggtgttcactcccccctccctcccggtgttcactcccctctccctcccggtgttcactcccctctgcctcccggtgtttactcccctctgcctcccggtgttcactcccctctgtctcccggtgtttactcccctctccctcccggtgtttactcccccctgcctcccggtgtttactccctgcatcccggtgtttactcccctctgcctcccggtgtttactcccctctgcctcccggtgtttactcccctctccctcccggtgtttactcccctctccctcccggtgtttactcccccctgcctcccggtgtttactcccctctccctcccggtgtttactcccctctgcctcccggtgtttactccctgcatcccggtgtttactcccctctccctccctctggcgatactcccctctccctcccggtgtttactcccctcttcctcccggtgtttactcccctctgcctcccggtgttcactcccctctccctcccggtgtttactcccctctgcctcccggtgttcactcccctctgcctcccggtgtttactcccctctgcctcccggtgtttactcccctctgcctcccggtgtttactcccctctccctcccggtgtttactcccctctccctcccggtgtttactcccccctgcctcccggagtttactcccctctccctctccctcccggtgtttactcccccctgcctcccggtgtttactcccctctccctcccggtgtttactcccctctgcctcccggtgtttactcccctctccctcccggtgtttactcccctctgcctcccggtgtttactccccctctccctcccggtgtttactcccccctgcctcccggtgtttactcccctctccctcccggtgtttactcccctctgcctcccggtgttcactcccctctgcctcccggtgtttactcccctctgcctcccggtgttcactcccctctgcctcccggtgtttactcccctctgcctcccggtgttcactcccctctgcctcccggtgtttactcccccctccctcccggtgtttactcccctctgcctcccggtgtttactcccctctccctcccggtgtttactcccctctccctcccggtgtttactcccctctgcctcccggtgcttactcccctctgcctcccggtgtttactcccccctccctcccggtgttcactcccctctgcctcccggtgtttactcccccctccctcccggtgtttactcccctctgcctcccggtgtttactcccctctccctcccggtgtttactcccccctgcctcccggtgtttactcccctctccctcccggtgtttactcccctctccctcccggtgttcactcccctctccctcccggtgttcactcccctctgcctcccggtgtttactcccctctgcctcccggtgttcactcccctctgcctcccggtgtttactcccctctgcctcccggtgtttactcccccctccctcccggtgtttactcccctctgcctcccggtgtttactccccctctgcctcccggtgtttactcccctctgcctcccggtgtttactcccctctccctcccggtgtttactccccctctgcctcccggtgtttactcccctctgcctcccggtgtttactcccccctccctcccggtgtttactcccctctgcctcccggtgtttactcccctctgcctcccggtgtttactcccctctgcctcccggtgtttactcccctctccctcccggtgtttactcccctctgcctcccggtgtttactccctgtgtcctggtgtttactcccctgcttcctggccatctaccttctgccggtcttgctgttttcacacgttctgccccatgggtgatggattgtgttctgtggggccctgagatcacacaggcaacagaacagacattttctccacaggaagtccttgcggcatccagcagtcttcctgcctctgtgcctgcactctgcccacagccaccatcccccactgccccggctgcctcccccaggacccttggcaaatgtatcccaagcctgggccccggcacagggcctgtcagccacgtggctgccctggactccccctcccctgtgctggttccccatgcagggcaggcgtcgggtgcacctgtctgtggacccccccagctggtggcacagcaccaagcatgtaaccagctcctggtaaatattggtccagttgccttctctgacacaaacaagagtgagggatcttggtgatagtcccagttgagcaggtggacatttaggagaaatccttccctacattctgagatatttctgttcccccatatccaactcctgctgcaccccgcaggcctcagggaactgagggatgggttcaacctgtggctccctgctcagaggctcagataagaatgagctgagtgtgggctgagcacagtggctcatgcctgtaatctcagcactttgggaggccgagatagggtgaccacttgaggttaggagtttgacaacgtgatgaaaccccgtctctactaaaaatacaaaaattagccaggcgtggtggtgaacgcctgtagacccagctactcaggaggttgaggtgggagaattgcttcaacccgggaggcagaggttgcagtgggccaagataatgccattgcactccagcctgggcgacagagcaagactccatctcaaaaaaaaagaatgagctgagtgtgttaaggtgttgttttcagcagcgtctgcttagggctacacgtgggcctttctccttttgtgtggcttttgcacagctaatgggcatggagatgacccttgccaaagccccccaaggtcccattactcgtagatttgaggaacgcagatggcttcaagggatgtgaaagagtagacagcagacacaggagggagcgtttcaggagaggagcccacagtgagcccttgggactgaatggcccagcctgggggtgtgtcgcggaggccacgtgctgcaaaccacctgggttttgctcctctctaaagtgtctcagggacaggaggctgccccatgacagccaccaatgcctgatggccagagcaggccagggaaccctgggaatcccaatactggggcacagttctcaaggcctcagcggcctcttcacatgtacttggcacaggaggcaagaagacagcgcgtctccaagccaccccttgggcactgcactcacgttctctgagggcaacggcggaaaagggggcagtgcaggaatgtggggggcatggggaaccgaggccaggagagggtggccttgcccggaaggacgagggctgcaaaggtgttttctggagggaaacgtggagtaaggaggaagcctggaattttagcatcttcccagcgcacacggcggctttattggtgtgccagggatgtctctagtctgaataaaaagggatgctttctggctcaccctgtgccaggatagagggaagcgtgttctgagccaggcatggggccccatctgctccctggcagcccccagccgcggcgtccgccttccctggagcccgtccccagccgctcacctcaggtgcagctccagctgcgtgtagaggaagtgcaggaacgcccgccgggccacgacctccgcgtggcagtcattcaccaccagcccctggtcactgaggtgctcgccgctgatgcacttggtccccgaggacagggccacgacctgcgcctgccgagcatccaggcctggggacacagatagcatcagagcagcgtggcccacggcccccgtctccctcctcctcggtcttttcagggtctcacaacagcggtttccctgggttaggaaaccttggaaacactgcgttttgagagctgggaagcgaggcttctgtgtgctccaggctgtcacgggtgaccgcccgcctgagggattcccatctacttcatggtggcctgagacagcgctcagagtgcctctgctatccttaaggttgctgaaatgctccttaggcaccataggagcagagttttgaggtcaaacttactaccaggacagttttctccacctgagtcccaggtcccctgtgagtgggagcagtgctagctgcggcctgggcttcctgcccaacctctaaccacctttgtgctttctcctgtcctccaacgggatcagggcaggacaggagctgatgaacccttcaccctaacacagaaacacaggacaggagctgatgaacctgtcatactaacacagaaaggaggctggatgtgtcattttaaccatagtcaaaggaaccccatccacaaaaatgatactctcttcagggactgaaaacaaacaacaaagaaacctcaaaaacaacccccaacgtaatgtccttaaagtataatattcatcactttgtttaaggaggagaagctggaagacacaagccaatgtttgctgtgctctaacaggtctgtgtggatgtgtattttctctgcacttagatggtgaattccttgaggacacgagtcagaatttccaccaaatactccaagcaagggctccctagggagtccgtgtcattagacgggtcagtgttgccgatccaataacaaatccatcatccaggcccttcggctggaggtggcaggaatgttgcgggtgcccaggagccttgggatgtgacagccactggctgggcccggatcgcaggccaagggagggcagcacggagacgcgttagccgctgaccgcggccacgtccacagagttacctgtaaatacacgtccggaccatttcttggaagaggtgacacacaaattaatgtcacgccagaagcaggcctccctcccatcttaaataaaatcgactaattaatgtcacgccagaagcaggcttccctcccatcttaaataaaaacagtgctggctggtcatgagcgcttctcgcttctcacacacttgttcctctgatgtgactttttctcccctgagaacttagttcttgagccctgagggcatctgccctctctgggcctcaccgtgggatctttcttcgtgagataaaagggtggtgtcagcagctaccagtgacagccagggagaattcggggccgggagggaccgagcactggggaagtaacctgcagaggcccagcagcatccttgcccccatggctctgcagctggggtctgtctgtccagcctccttccttccaggcaaagcggtctagcacagcccccgcctcctgcccatgtccactgctctctccgctcatcccagcttctcccagcagcccccgtttctgtgcccgaagagaactccatggtcctggtcctgttgtctacccactgccccctccctggtgggacgggactgctcctgagctcaggaagtgaccagacttccccacgccgctttaatcagaacaggacacgaccagccgccctgaggttcctcccccaggaaagctcgtgagcagctgccgggttccaggtccaggcctcctcctctctcagccatcctgggtgcgggggctgccccctagcgggggtcccagaagttgacgagcagatgggaccaggatctaaggctacagggagctggggtgggcagctgctactgactctgccaggggtgggagccaccatctcactcaggccgtcagtgacatgtggactgttgagaaatggttcacaaggatgacatcgtgatgcagaaaccacccctcaggttccagcttcgttaaagctggtatttagagaaatgggaaacacattgataacgattcctaaccagtttcagtgttcacgaccggtgcgcatgcagtctctggtggaaacggacagctcttcaggaataggtgctgtggcctgtgaggccccggcctgctccttctctttggattccgtggaaattggagctgtagaaaaaagcaactgctttccctttacccctcattgattcccagctccgtttggctccagactctgccacactcagcacaattacgtggcccaagaagtgtttgcatattcagttttcatgattctcacccccaccgccagcaccacgttcccaacacaggagacgcgaagcctggaccgagggagatgacgcggtcagaaacggctgcagcatgagatgtcgtatgagaaatgtcgcggaagtgctgtacatggaatgtcaccagcatgacagtgagggaggaaaagggagagacggactcacacccagggagcttctgcacaggtggcaggaggaggcgtcctaggcagagtgggcatggtggtcagaggcacggataggaaagggcacaggcatattctgcataatctgcgtattctacgggccgttggagcccgtaggagatgtgtgtgggaaagtggcgaagcttcaaaggtgggtggaaatcagtcacagacgccttgagtaccaccctgaagatctagctcttcaccaatagacaatgggagctgtgaaagggttttccggaaggacagcagtactgttgcccatgagtgagtgctgggttgcacaggaggagagaaggggccaggacactgggtgggaggctggggctggacatggtgcatgaggacttaggaagcaccctcaggagtggattggtgggagggacccagagagcacagcaaggaccgaatccacaggatttgggaaatttacacagaagatgagggagaggaagaagccagaaaatgtgcttgagtaccacacattacaaatgagaaataggaagatttttatttatttacttattttttgttttttctttttcttttttattatactttaagttttagggtgcacatgtgcacaacgtgcaggttagttacatatgtatacatgtgccatgttggtgtgctgcacctgttaacttgtcatttaacattaggtatatctcctaatgctattcctcccccctccccccaccccacaacaggccccggtgtgtgatgttccccttcctgtgtgcatgtgttctcattcttcaattcccacctatgagtgaggacatgcggtgtttggttttttgtccttgtgatagtttgctgagaatgatggtttctagcttcatccatgtccctacaaaggacatgaactcatccttttttatggctgcatagtattccatggtgtatatgtgccacattttctgaaaccagtctatcactgatggacattttggttggttccaagtctttgctatcatgaatagtgccacaataaacatatgtgtgcatgtgtctttatagcagcatgatttataatcccttgggtatatacccagtaatgggatggctggatcaaatggtatttctagttctagatccctgaggaatcaccatactgacttccacaatggttgaactagtttacagtcacaccaacagggtaaaagtgttcctatttctccacatcctctccagcacctgttgtttcctgactttttaatgattgccattctaactggtgtgagatggtatctcattgtggttttgatttgcatttttctgatggccagtgatgatgagcattttttcatgtgtcttttggctgcataaatgtcttcttttgagaagtgtctgttcatatccttcacccactttttcatggggttgtttgatttttcttgtaaatttgtttgagttcattgtagattctggatattagccctttgtcagatgagtagattgcaaacattttctcccattctgtaggttgcctgttcactctgatggtagtttcttttgctgtgcagaagctctttagtttagttagatcccatttgtcaattttgtcttttgttgccattgctgttggtgttttggacatgaagtccttgcccatgcctatgtcctgaatggtgatgcccaggttttcttctagggtttttatggttttaggtctaacgtttaagtctttaatccatcttgaattgatttttgtataaggtgtaaggaagggatccagtttcagctttctacatatggctagccagttttcccagcaccatttattaaatagggaatcctttccccattgcttgtttttctcaggtttgtcaaagatcagatagttgtagatatgcggcgttatttctgagggctctgttctgttccattgatctatatctctgttttggtaccagtaccatgctgttttggttactgtagccttgtaatatagtttgaagtcaggtagtgtgatgcctccagccttgttcttttggcttaggattgacttggtgatgcgggctcttttttggttccatatgaactttagttttttccagttctgtgaagaaagtcattggtagcttgatggggatggcattgaatctataaattaccttgggcagtatggccattttcacgatattgattcttcccacccatgagcatggaatgttcttccatttgtttgtatcctcctttatttcattgagcagtggtttgtagttctccttgaagaggtccttcacatcccttgtaagttggattcctaggtattttattctctttgaagcaattgtgaaagggagttcactcatgatttggctgtttgtctgttattggtgtataagaatgcttgtgatttttgtacattgattttgtatcctgagactttgctgaagttgcctgtcagcttaaggagattttgggctgagacaatggggttttctagatatacaatcatgtcatctgcaaacagagacaatttgactttctcttttcctaattgaataacctttatttccttctcctgcctgattgccctggccaaaacttccaacactatgttgaataggagtggtgagagagggcatccctgtcttgtgccagttttcaaagggaatgcttccagtttttgcccattcagtatgatattggctgtgggtttgtcatagatagctcttattattttgagatacgtcccattaatgaagaatggccaaatttggggctgaccgatttaatttgggggaaaggagagggcgggcgtcatcatctctcccctcggtgccatgagggtgatgaggcatcaggcagcatagtgaggtggagaacagagctcagtagcagttgaagactgcgagcaaaaacgtgtcaaaaacagaaacggcaccaaccagcattcagataaacacgcttttcttaacacccccatcacaggggacagcgcgagggtgctgccaccatggcgggaccacaggcaggtctagggccctcatacctatggggagaaatggggtccttggtttatgggcatcaccctccaggtataaaccagtggtatttggggctgtgtcaaccctgcacagaggtgtctaacattctcctttttcggtgctctggttccccacatggagatccttgattgctgggatgggggtgaggccatgccaagccgtatggacaccaaaaatgctctgcactcaatgagcaatgctttgtgtaaaaatgtgcccaaagccaggccgccttgcagcagaggctgggtcggggatgctccagtaggggcttattaagtcaggaagacaggatggggcagcaaagacgccaggcgaggggaggctgtactgaggtcccgtctccagctgaccaaacaggaagctctggagtgtgaggcaaaggtgtgcgacgtgtcagtcatgagctgtgggcactcccaggcgtgcaggaggtgcaggaagacttaggaagtcctcctgaggtcccgtctccagctgaccaaacaggaagctctggagtgtgaggcaagggcgtgcaacgtgtcagtcatgagctgtgggcactcacaggcgtgcaggaggtgcaggaagacttaggaagtcctcctgaggtcccgtctccagctgaccaaacaggaagctctggagtgtgaggcaagggcgtgcgacgtgtcagtcatgagctgtggacgttcccaggcgtgtaggcttctggtggctagggccattctcaggaggaggctgcagctgtgagctgctcctggccggtactcggagccaggagaagatcaggaagcccaggatggggcggctgtggtgccaacagcatttactccaatccttccaatgatgctgttaagccaataaaatgcaagtttgtatagaagcatcactccatacatagtggctattggtgatctcttttcctataaatggctattgagagtaaaactactactctgtaagacaacatgagaagtagtcacagaaaatatacgaatttctatagaataagtggaaaagctggccaaacagcagggctcctgcacccccgccaaagcaccaagcacagtgagttttgtagaattcgactgaaccttcaagtagcagatggtttcaaggcaattgtaagtgttctggagcatataaagacaagagaagccttcgggttgtgtgttatcatggaatgcctaaatcattgccatactgacgtagcctgcacaacaaagcagacaacagaggaccctcagttagacaaaatactagccatcaagtagcagaggaaaagagcactacagtacgtccctgcaacatgggcttatttctgaaatgtgataatcagttatattaaaaaattaaggccaggcacacagtggttcacacctgtaatcccagcactttgggaggctgaggacagtggattgcttaaggccaggtgtttgagaccagcctgggcaacatagccagaccccaagtctacaaaaaatacaaaaagtagctgggtgtggaggcgtgagcctgtagtcccgggtacttgagagactgaggtgggaggatcacttgagccctggaggcggaggttggagtgagctgagattgcgccactgctctccagcctgggtaacagagcaagaccctgtctcaaaaaaaaaaaaaaaaaatggatttatatgcaacacaaaaataggcataattacagacactgataaggcatctgacaaaatacaacaaatgcttttgataaaacactgagtttttatcaaaactcaactctgtcaagtggaacagagggatttttttcctgaatgtgattttatgcacacacacacacacacacacacatacacacgagtatcatgctctatggggaagcactccaggcatttttatgaccattcaggaacatctgctgcagccattgacgagcacaacaagagaaagaaattagctctgtagtaattggagaggggcaggtaacacaagcactgtctgaacatgttatgattctgtgtctggaaacctccagagaatccagttgacatactgctagaaacaatgagagagcttaatatggtgaaagcgttccaagttaatatacagaagtcaataactttcatagagacacacagcaactagagagacactgtaaaggaaaaatgactccatttataatggcagcaaacgagataataggaataagtttaacgagaaatgaccaaggactatagtgaataaaacttaaaaatcctattgaaggacacaacaaaatttaaacaaacagaaagacttgccacatttttggatagggaggtttaacataatgaatcctctctaaattgattcataaatttaacaggattcccaaagaaacagcaatggtgctttgttttggacaagacacctggttaaaaagtataattttgttttgctttgccattgctatggcttgggtatggtttatttgtagccaaaactcctgttgagatttggtcctcagtgtggcggtgttggggggtgatgggacctagtgggaggtgtttgggtcatggggtggattccttatgaagggcttggtgctgtcctcaaggcggtgagttcttgctctggcaagatggattagtcttcaaggaaatgggttcgttcctgtgagagttggctgtaatgaagccacgatgtcccttagtcttcaaggaaatgcattagttcccatgagcgtgggctgtaatgaagccatgatgcccctctggttttctctttacaagtgtctgcttcccccttgaccttctccatcatgttatgatgcagaaaaaaagctctcaccagaatccactgccatacccttaaacttcccagcctgcagaagcatgagctagataaaccactattttttataaagtacccagtctcatgtattctgttatagcaacacaaaatgaactaagatagttatttgtttttaactgggcaagctgattctaaaaggaaacccagaaaattctgaaaaagaaggctaatgctggagacaagccctagtgtacatcaagcaggttatagaggctccatgccaggtcactgtggggatggggtgtgaagtgaaacaggtggaacaaagtggggagtccagaaattgacccaacacgtgcaggaatttagtataggacaaaggtaatcacatctcaaaccactgaggcaaagagagactatccaattaatggtatctaacaactgcatagtcatctgagaaataaaattgcatctttatctgacaccatgtaccagagtaaattccaaattgatcaatgtttagatgtaagaaatgaagaactgtatttgaatgtttacagcatctttacccataattgccaaaacttggaaacaagcaagatatctttcagcaggtgaatggataaatcatggtacattcagacaatggaatattactcagcactaaaaataaatcagttatcaagccatgaaaagacatggaggaaagttaaataaaagttaagtaaaagaagctgatctgaaaagtctacatattatatgatttcaactacagggcattctggaaaaggcaaaactatggagatatgtaaaaaggtcagtggttgccaggggatgaggcggggaagggatgaatagatggagaacagaggatttttagggcagtgaaactactctgtttgatggtacaatggtggatccatgtcattatacatttgtccaaacccatagaatgtccaacaccgggagcgaaccctaacacaaagaatggtttttgggtgattaaagaaataaagatgcatatgtcataaataaaataagggataatgtataaacttggtgggtgctatggtttaaatgtggtgttttctccaaaatttatattgaaacttaatcctcattgtggtggtattaaaaggtggggcctttaggaggtgattaggggatgagggctccaccttcatgaatggattaatacccctataaaagagacttcagacagagtccagccctcttatgccatccatcccatctgccatgtgaggatacagtgttcctcccctccaaacgatgtagcaacaaggcaccatcctggaggcagagtgcagccctctcgacaccaagcctgctgacgtctggattgtggacttcccagcccccagaactgtgagcaatgaacttctgttgtttataaatggctcagtctgaggtactttgttgcagcagcacaaatggatgcagacacagggcttctccccagcacattacccatctctagacaatgtctgggaatgggcttttattatttacttggaactaagtcattctcagcctgttccaatgttttaaaggtaaatttcttatactgtatctggttttggaggaaaaggattaccaaatttctaagaagaaaactgaaagtaaaatataccaaatagcatcaaagaaatacatttcaaaattatagaagatatagagagaaaggaataatttttactccacatgtagactgccccaagggtgtcatgtgtaattaactctgcctccctatttcctagaactgtgcccactgaatttaatgactcaacaacagggtttccacagcttgccttgagaaagactcttccacagtttatcagtgctcagtgttaggaaaccttcttcagtgttcagcctaactgatcttctgtacaatttcagtccacttcccagacttcatctttaaagctcccagtctccttgtggttggtattctctgaatactcgcagtgaatatcatgatcggcctgcaatcccacatctagtcattatttggtcaaagtctatgttttattttcaatcttttcctgcaagccaatttttttttttttaaatcttctggtgtttctgcttccattctctatatttcctctaattagttcgaaatcaggtagattttaaaatgtctggcttggggacatcttgtctgttggggacatgattggactgagactgaaaggaaacagctttgcttttgacaggggagatttttcttccactagggtcttgatttatggctttcctcaggaatcagaagacaccagtgtctcctgggcttttattctctaaacatttcaaatgcattgattttggaaggaaaacaagttatgtgtaaatgttttgtgctctcctctatgaatgacaatacatctggggaatatcagataacaaagcactgtagtcagagtttaacaggctctagggcacaggtagccctgtttctgctgcttacttgaggcaagaatttaattgtgttcagttatcttgtttggaaaaagtttttaaagattaaagaaaataatgcgaagttcttaacatgtgcctgatacacagcaaaaatgccgccatctttagctattatgatacatatatttctgttctcttgtaatcatatttgtttttccatctgcaaccaggatgtttctgtgacttcccttgctagaataacacacaaaaaaccatgtgttccattattaacttctactgactatgaagcacatgttcttgcaatgagaacaagagggctggtgtgggaaagcttaaagacaagacacgttcaagaacacctttcaactaaatctgaccatggcattgcaccatgggccaaataacaattccaggatgagcactcgcttgctttaaagtatcaagggcatattttaatgtatttccatttgtttatccatccattcattcagtgggcattaaacacctaccttattcaagggaaagaggataaaaaactgtgcagtctcaaagctcctttcacagcacatgctcacaggcagggagaaggcagcatggcaggagagcagaaactgtctgtggttgggctacaccagctgtagggacaccttctcagaggatggggcaaccatggacatcaaagccagtgttaagagagggagaaagaagagacctgtgtcctggactagaaggtgtgtaaccactggccacgtaaaggaggaagagtagctgaagactgggagcagcctgcatgaaaacaaggagctctgtggtgaggatgtggtggcatctgtggttaggatgcggtgggctctgtgggtaaaatgtgggatctggttaagatgcgatgggctctgggttaggatacggtgggttctgtgtttaggatgaggtgggctctgtggttaggttagaatacggtgggctatggttaggatgcagagggctcggtggttagggtgaggtcggctctgtggttaggatgtggttaggatgccgcggtctctggttaggatgcagttgactctggttaggatgcagtggattccgtggttagaatgcagtgggctctgtggttaggacatggtgggctctgtggttaggatgtggtgggctctgtggttaggatgtggagggctctgtgtggttactggtgtagaactccagtgcctgtgaggcagtagtagtttctggagggcctcctgttgtatgggtgacatcaccagaaccgtctaccttcttcccaggtactcctgagtggagatgatgggtagaagccttgctcaccatgttgtcttcaccagaactgggagaattgctctctgcataaaagatgtcaagcaagttttggccattctttcttatacttgtgtgatcagaggaatcttttggtcactgttgaaatcacagatgtggctccagtctcctacaaatcgagaaccccaaaactattgaatgagcatctccttgtgaggttcctgaaaatctgtttttaggcaatgttttcaggttattcttatggtcaggtgaatttggggagcagaagtatgtgaaaaaaagcagatgcagaatattcactttttcacctggctgtgtgatgtcattggatgcagtttgggaataggtgctcttcactgaggcagattctttggtttggcaatttgaaagagaaaccattgaatcaaggggcagtttctcttgagcgttgcacacatatggtgctcaatagattgtaggcatctacaaagaaaacccactctgtgggcatccacagatgccatggtccccatttgctgtacctgagcttcaaagaatggtgggcaactgattagtgaatcccaaatgctgactctgtccaactgtgtgaacacgctgtgaaagccagggtttctcagcctcagcacttagttgtcaggataagcacagtaatcacatactcattaatttccttataaaatgctcccagaggacatgccaccctcactttcaggtgctgagactgccagtcatgccggggctcagccccagtgagggagcaagcggggccaatgctctgagctcctcatggggccaaaacatgagggagtgcttggatccaggaatgtcagaaatgaataactctgctgttttaacactcattctttttccttccaaaatggctggggcttgctttgtcaacacagattcacatgttgctctgacaggaaatgaggcaatcactggccctgggtgccacgtcacgtagcttgtcctcgtcagtgcagctgacgctcaccaagccttctgtgccaggcacatgtgagcgctgggtctacacactaatcaaacatgctgctcactccacataacatacaacacgacaaaggcattgagagagcccagaaaccatgccaggctgacgctggctgctgtccacctgtgatggcctcgggcactgtggcccccactacaacccaaagagggtcaggccatggacagggatgtgaccagatgtcagctggtcaacgctctttgctgttccccatcagggaatggaacttctccaaacctgatgggctgtcggtgaggttagaggtaagagggaggaaactgaggagatgccagtgacctttctgtgggccttgggcagggagctggctgcatggttcgctagacagtgtgacctcatgagagtggaggggatccctcccaaacaggtcacacgtgtgtctgtgactcatggtgggtcaaacacactatagccccatcagcgggcaggacaagttgggccctgacacaggcagcatccaggcaggcaagcacattgacaaccacatgtcagccctgggagctaacggtgtttacatgacagtggcacatctggcacattctcctactgaattaacttgacttttccaaagtatacttgcggggcatgagaatggacaggcagatgcagcagtatttgctgctgcacagacctctccacactcgtcccagcacagtgctcaacttggagtattgcccagtattacagctcagtaacgaagagggacttgaagctccaggagatgtgagcaggcactgtggatgcctgcaccagtgttggtttttgaacatccagctccaagctgtcctccctcactggctctgctgtggagactgagatgcaaaactctccctttccaactctccccgctacttcctgcacagctgagtggccagcagcaaaatcctgaccaaaagaagtctgtgggatggaacatgtcctcctcctgccctgatggggtctgggagcatgacctgcagcagcgggtgggatgaggagaggtcagggggccacacaccctgaaaccacaggggcctgaatggcgcctgccaccactgtctggcatgtgggccactgttggttactgagacaataaaaaggtgcgtgtttgcaacactgctaatcagctatctcacttcctgcagccagtggcattctgagtgcataaaacctcaaaatacatagaatttggggtaggataccacatatatcaaaagatggggccaggcgagcttatgagaaggttattagttacgatcctcaacatcaacactgcaagggtttcactggatataaatatggtaattacacatttagtaaatatatttaatgccctgttcctacccccaagaaagaggtagaatgacaacaaacgctttgcaattaatagattgaaaagtctattaaaagtctatttatctcctcatttgcattgggctgagcaagctcttcaccccatatcaaaggaacaaataggaaacacctggtatgatcgatgaacggtctcttctcctaccgaggatggctgacaaggtctcctcactggcactaaaaccagaaataatgagagcatgaagcccgcgctcataaataattcatggactaaatattgtaagtgacagtgctttcttcatttttaagcaaccacttggtatgcttttgttctgtttttaagaagatcatatttgaatcagctcagaggcgagctgtgttcaggccctgtgagctccacgccctctctgctgacctctaatactttctattcttttcttgactgaggtgtgagttcccctgggctcaaatctggctggttagttagagcacccattcttgggtaatgacccaaccacacagggaggcactgacctaagttggggaggccgccctgaacccactgtcgattgtagcttcatactctcctccccttctctgccctccactgagcttgtcatggactggctcctccctgagccacctgttgccaggatggccccaaagctgagactgctttcctccatcgggagctcctcctcagcccgagaccccacttcccttcctcttcagggtcagcactcagggatcagatgcccatcccctctctaacctgggagcctgcctccatgcacacctcttcctgtcatcagtgtgatgaagctgctgcaggggctgggtccagagcgctgtgcatgaggacttcaaaagtccaacggagcagcagaaggagacacagacacactgtgcagtgagggtgtgtgggaaagagaggtgcggagagaggaaagtttggttataacagcatagggcaggaagccaggagaccctgtgtttcttggtgtgaattacccccaggttccaacgtggatgtgtctggaacagcaccaaaggttcctccagtgtttccgcagggaagtcctttcaatatcacctaatgcagatggacacatcttgaaaatttaaatatggggtctactggggaagcagggagtgtaaaccatgaccccaggtgcacacatttgaaagtccacacttacttcagagggttacagcttcactcagtttcacatttgttcactaattagcctgaatcctttagaatatctttattatatctccatccacacagtggggaccctgtcaacgatgattaactcctgctcacagataatgcacagtcatttcctgaagcttctttcttccttctccttccctttcctagctctctctttttctctttctctctccctccctccctaactctttttctttcttgccctctttcttaagtgtgcttaaccatagcatggttaaggtaaatataagaatattttagcttgttaggaagaaactgcatcaactaatgagcaaaataaccagctaacatcataatgacaggatcaaattcacacataacaatactaaccttaaatgtaaatgggctaaatgctccaattaaaaggcacagactggcaaattggaaaaagagtcaagacccatcagtgtgctgtattcaggaaacccatctcagctgcagagacacacataggctcaaagggatggaggaagatctaccaagcaaatggcaaacaaaggcaggggttgcaatcctagtctctaataaaacagtctttaaaccaacaaagatcaaaagagacaaagaaggccattacataatggtaaagggatcaattcaacaagaagaactaactattctaaatatatatgcatccaatacaggagcacccagattcataaagcaaatccttagtgacctacaaagagacttagactccccacaataataatgggagactttaacaccccactgtcaacattagacagatcaacgagacataaagttaacaaggatatccaggaattgaactcagctctgcaccaagcagacctaatagacatctacagaagtctccaccccaaatcaacagaatatacattgttttcagcatcacaccacacctattccaaaattgaccacatagttggaagtaaagcactcctcagcaaatgtaaaagaacagaaattataacaaactgtctctgagaccacagtgcaatcaaactggaactcaggattaagaaactcagtcaaaactgctcaactacatggaaactgaacaacctgctcctgaatgactactgggtaaataacgaaatgaaggcagaaataaagatgttctttgaaaccaaggagaacaaagacacaacataccagaatctctgggacacattcaaagcagtgtgtagagggaaatttatagtgctaaatgcccacaagagaaagcaggaaagatctgaaattggcaccctaacatcacagtgaaaagaactagacaagcaagagcaaacacattcaaaagctagcagaaggcaagaaataactaagatcagagcagaactgaaggaaatagagacacaaaaaaccttcaaaaaattaatgaatccaggagctggttttttgaaaagatcaacaaaattgatagacctctagcaagactaataaagaagaaaagagagaagaatcaaatagatgcaataaaaaatgataaaggggatatcaccaccagtcccacagaaatacaaactaccattagagaatactataaacacttctacgcaaataaactagaaaatctagaagaaatggataaattcctcgacacatacactctcccaagactaaaccaaggaagaagttgaatctctgaatagaccaataacaggctgtgaaattgaggcaataattaatagcttaccaaccaaaaaaagtccaggaccagatggattcacagccgaattctaccagaggtacaaggaggaactggtaccattccttctgaaactattccaatcaatagaaaaagagggactcctccctaactcattttaggaggccagcatcatcctgataccaaagcctggcagagacacaacaaaaaaagagaattttagaccaatatccttgatgagcattgatgcaaaaatcctcaataaaatatgggcaaaccgaatccagcaacacatcaaaaagctcatccaccatgatcaagtgggcttcatccctgggatgcaaggctggttcaacatacgaaaatcaataaatgtaatccagcatataaacagaaccaaaggcaaaaaccacatgattatctcaatagatgcagaaaaggcctttgacaaaattaaacaacccttcatgctaaaaaaacctcaataaattagttattgatgggacgtatctgaaaataataagagctatctatgacaaacccacagccaatatcatactgaatggacaaaaactggaagcattccctttgaaaactggcacaagacagggatgccctctctcaccactcctattcaacatagtgttggaagttttggccagggcaatcaggcaggagaaggaaataaagggcattcagttaggaaaagaggaagtcaaattgtccctgtttgcagacgacatgattgtatatctagaaaaccccattgtctcagcccaaaatctccttaagctgataagcaacttcagcaaagtctcaggatataaaatcaatgtacaaaaatcacaagcattcttatacaccaataacagacgaacagagagccaaatcatgagtgaactcccattcacaattgcttcaaagacaataaaatacctaggaatccaacttataagggatgtgaaggacctcttcaaggagaaatacaaaccactgatcaaggaaataaaagaggatacaaacaaatggaagaacattccatgctcatgggtaggaagaatcaatattgtgaaaatggccatactgcccaaggtaatttacagattcaatgccatccccatcaagctaccaatgactttcttcacagaattggaaaaaactactttaaagttcatatggaaccaaaaaagagcccgcatcaccaagtcaatcctaagccaaaagaacaaagctggaggcatcacactacctgacttcaaactatattacaaggctacagtaaccaaaacagcatggtactggtaccaaaacagagatatagatcaatggaacagaacagagccctcagaaataacgccgcatatctacaactatctgatctttgacaaacctgagaaaaacaagcaatggggaaaggattccctatttaataaatggtgctgggaaaactggctagccatatgtagaaagctgaaactggatcccttccttacaccttatacaaaaatcaattcaagatggattaaagacttaaacgttagacctaaaaccataaaaaccctagaagaaaacctgggcatcaccattcaggacataggcatgggcaaggacttcatgtccaaaacaccaacagcaatggcaacaaaagacaaaattgacaaatgggatctaattaaactaaagagcttctgcacagcaaaagaaactaccatcagagtgaacaggcaacctacaaaatgggagaaaattttcgcaacctactcatctgacaaagggctaatacccagaatctacaatgaactcaaacaaatttacaagaaaaaaacaaccccataaaaaagtgggcaaaggacatgaacagacacttctcaaaagaagacatttatgcagccaaaagacacatgaaaaaatgctcattatcactggccatcagagaaatgcaaatcaaaaccacaatgagataccatctcacaccaggcaatcattaaaaagtcaggaaacaacaggtgctggagaggatgtggagaaataggaacacttttacactgttggtgggactgtcaactagttcaaccattgtggaagtcagtgtggcgattcctcagggatctagaactagaaataccatttgacccagccattccattactgggtatatacccaaaggactataaatcttgctgctataaagacacatgcacacgtatgtttattgtggcattattcacaatagcaaagacttggaaccaagccaaatgtccaacaatgatagactggattaagaaaatgtggcacatatacaccatggaatactatgcagccataaaaaatgatgagttcatgtcctttgtagggacatggatgaaattggaaatcatcattctcagtaaactatcgcaagaacaaacaaccaaacaccgcatattctcactcataggtgggaattgaacaatgagatcccatggacacaggaaggggaatatcacactctggggactgtggtggggtggggggaggggggagggatagcattgggagatatacctaatgctagatgacgagttagtgggtgcagtacaccagcatggcacatgtatgcatatgtaactaacctgcacaatgtgcacatgtaccctaaaacttaaagtataataataataataataataataataataataaaagaaaccaccatcagagtgaacaggcagcctacagaatgggagaaaatttttgcaacccactcatgtgacaaagggctaatatccagaatctacaatgaactcaaacaaatttacaagaaaaatcaaacaaccccatgaaaaagtgggcgaaggtatgaacagacacttctcaaaagaagacatttatgcagccaaaaaacacacaaaaaaatgctcatcatcactggctatcagagaaatacaaatcaaaaccacagataccatctcacaccagttagaatggtgatcattaaaaagtcaggaaacaacaggtgctggagaggatgtggagaaataggaacacttttaccctgttggtgggactgtaaactagttcaaccattgtggaagtcagtgtggcgattcctcagggatctagaactagaaataccatttgacccagtcatcccattactgggtatatacccaaaggattataaatcatgctgctgtaaagacatatgcacacatatgtttattttggcactattcacaatagcaaagacttggaaccaagccatatgtccaacaatgatagactggtttaagaaaatgtggcacatgtacaccatggaatactatgcagccataaaaaatgataagtctatgtcctttgtagggacatggatgaaactggaaaccatcattctcagcaaactatcacaaggacaaaaaaccaaacactgcatgttctcactcataggtgggaattgaacaatgagatcacatggacacaggaaggggaacatcacacaccggggcctgttgtggggtggggggaggggggagggatagcattaggagatatacctaatgctaaatgatgagttactgggtgcagcacaccaacatggcacatgtatacatatgtaacaaacctgcacgttgtgcacatgtaccctaaaacttaaagtataataatagtaataataaagaatattttagcttgttgaataataggagaatgtggctttacacaccccaaacattgcctggcatgcaggtaaacactggatgctagtgtcctttattttttcaccaacaaagttagtgttatgcttccagtaaaaaaagactcatagtcaaagagaccagaataaaatgagtttagttgtgttgctttgagatataatatggcgttggattttcttttcctggtgaagccttttggacaattagattgaagatagaattgaatgctcagttatgagttaataatcagaaaagtgaagaagtgtttgaacagctttgattggagtactagaccttgagagtgtagcaaaaatatttattttctcctccatttctcatgtatttccatctacccatttccttacttgggataaatgaaggcatttggtgaggatttaactcacggccagggctgccagtcctctccttagttaattcagccttgagggttttcatccgcaccctgtgaattattccaggctaaactatttaaatgagccaggctaaactatttaaatgttcgggtggaacaaatgtccagtcattgattttcttttcctctccattttgaggagggatgtttagtagaaatgtgtcagcattcacactacgcaagggtcagcaccggtttagtgaaatctgtcctgcattttatagtttaaacctaacagtttaaaccaaagatttaaaatcaattgcccatcagcgctccttattgtactcagccgtcggcctccgtgaatcttaatgtgcctgaacagacccacagagacacagcatcagcttcacatttctcggtatccacttagtaatcattaagatcaattccttgaaatacagatgataattcaccatctttcatcgcagcatgaggtttctgtttagggatttttgtccagttcatttgtttcagcttatcttcctcatgcccgactggatgcaaataaaaagaccttgcttttaattttaagatcaaagtgactgccagtcattcaggggagacaacggaaggaaaggttttgaaaaattgggggaataaactccttatactccgcttctcttaggtccttgtgaagatgaacttacacagatgctctttgtatgatggaaagagaagttttaactgtatttaaactgtcatggtttctaaagtgcaaatgggaaaatcatgtttgataaccagctttatctggtacaacacaataacacaattctttattcaagccgaaagcgtggcacagacagtacggacacatttctttaccttatgtgctcattttaggttcaaagccaagcatatgcagcaaaacatagtctacatttcaaaacttggaaaacttatgctccatcgtggaattaattggcacttttgtatttttcctaataagagaggccggaccacttccctcagaagggtttcctagttgtcctgggctgtttttacaaagttgaactctaccaggctgttttcaagaaatgtgcatttttccagggcagttgtaagtcagtccaagaaaattgtggagcgataaagctggaccttagtttaaatgggaaagaatatttataaaagccatattttcagaatatgttttgtaggctagactagcaaaaatttaaacatgaccccctaatgtactctagaaaactccttttttctagttattaataaactcgaaaaataatttcccataaagaggtaatgcatggtcaccaccgggccttgatgcctgcttccaaaaggaacctggaactgggaaggataaaggaccatcagctctacatttcagctctgccccgccctcagggcatcaggaaagccacttggcctcttcatcttcgtgtctgcatttcctgaagtgttaataagaattcctgccttccccacttatcggggttatgtcaatcaaactgattagtgtatgtaaaaatgctgtcaaaattataaatctgcatattaaatgcaaggcatcaccatcaacagcccctttaagaatcattcgctcatgaaacacaagagtttctaaataaagcggtgccctgacagtttggctagtaagtattgtaggggttcaagaggatgggggagaacatttgcttctctttttccagtgaaacgagaggattcgggagggaacaacgctgaactactgtgtgatggagagaaggggtgagtgggacccatgccctcccagaagacgccctgagcgggggcccaggctctcccggaagacggcctgagtcaggtccacgctctcccggaagacggcctgagaggggggcccaggctctcccggaagacggcctgagccaggtccacgctctcccggaagacggcctgagaggggggcccaggctctcccggaagacggcctgagccaggtccacgctcccccggaagacggcctgagaggggggcccaggctctcccggaagacggcctgagccaggtccacgctcccccggaagacggcctgagaggggggcccagggtcccccggaagacggcctgagccaggtccacgctcccccggaagacggcctgagaggggggcccagggtcccccggaagacggcctgagccaggtccacgctcccccggaagacggcctgagaggggggcccagactctcccggaagacggcctgagtcaggtccacgctcccccggaagacggcctgagaggggggcccagggtcccccggaagacggcctgagccaggtccacgctcccccggaagacggcctgagagggggcccaggctctcccggaagacggcctgagccaggtccacgctctcccggaagacacggtccacgccctctgagaagatggcgtgtgggtcggcgccgagaaggagtggtgagaatgagaacaaagcttcccagtggaagagagagcagctgtcttcgaggtcaggcctgggagggcccagcctcgtgcctgtaggtccggtgcaacagcgcatgtgctcctggcatagggctcactggattattttaagtaaatggctgtggtagttggccaagcatcctgctctctggggagaatgcctgagggtggaagcatttgttcagcatgaaagatggagtcccaccctacagggaggaaaggaccgcctgagaagggtccagggccggctgggaccccacctcattggcgctgtggtggggggtggggggggggccgtgcccacaaatcctaaggagacctgagctgatggaaatgggccctgggccgccttcccatctgggcgggagcctgtgggagaaggaccagccggccaccaccgcagaagacaccaggccaacgcctacaataccagtctaacgtctcgttcacaagtgtgtgtattcagacgagagccatcagcaggacacgggagaaagaccacgcgaaacagaaagccactgcccctggcctggaggacacgggccagggcgtctcctcagaggagttgagcagaagttacagctacagaacaagaggctcccttgaaaaaggaagaatggaggataagggaaagatttaaataatgaaaataggttgcaaaaattaggagggaaaggcagtttatgagctgtaggataaatttaagaaatctccaaaaacatcgagtaaaagaatgaagagacaaattttaaaagtaaaagcagaaaattaatagagtgttgcaaatttaacaaaaatgcgtgtaaatgaaggaattcataaaacaaatgacataaaactatacaaatagcttaaatatgtcaagagaagtgaatggctcacacctaaacatattcttaaatccaagttaaaaaaaaaaaaaaaacctttccccctcccgggtaggtgtgggtgctggtcactgcagagaaaatgtgaggcaggtcagaaatattggataaaagataatggaaacattacttcaaaatactgagggaaaataattgaaagcttagaattcccccctgggaatctattgagacggatgacaagcaaatcaaggaattttgagatgtgggaatattcacaaagttgatctcccatcgttttagatgatgcttcttgaggaagctctctatgaggggagacaaagcaaggaggaagacaatgattccggagatggtgtcccactggaagagcaggacgccgggtctgcagagcacgtgcctcgatgggcctggcctgggagttctctgggagagaggcaggtaccctctgtgagatgcttccatagaagcctcgtgacttagcacgtatggtaaaggcacaatcttcctctttcttttttttcaataagagaaaaaagaagacattccagaaaaaaacacgcacaatatttcaaaagcgatataagcaagtctagcaacacaagtgaatcaaacttaaacacaacacaacttggagctgggggtggaggcggagcctctgcgtgtcctgacgccaggcagccaggctcccttcccagcggaactgtgctgggagggttgaaggtggttctgcttggctctgtagtgggaatatctgcaacactctcatcagatagatgctgttcagctgttacaatcactcaaaagacaaagtagagaagacttaattatgggcataagaaaggatataaataccagtgatgatggtgtaaagatgtaacacgtataattgagagaggctggctagtggggaaggggctgagggctgccaccctcaacgcacagaacagggagtgaaaccacacccaaatttgatgcaataagaaataaaggtttatctataattgcacattacaaacataataatggaaaatgaaaaaagtatcaaatgttaatagcatgagtcaatagatgttatctagaactgaaaatctagaaatatagaagtatgtagtacttagaatcacaagaaaaaaatttgaaatggttagaggtggcttctgagagtgaaggggagtgaggggtggagtgggagaatacggcttttcattcagaagttctttagaatctttaccatatgactgcattaatttgataaaaataaaaacttctgttcataagtatatatttctgtgattatatttctcataatggctaagaaatggtctctgattcataaacagaactttcaggagctaataaatgtgaatgagttggcatcccatccacaggaggggcaaatcaaattgtgttttatttcaaaataagtttaattttaaaacattgtgacatatacagcaactagaacaagacatattactctgagaatttcttaggtatttgcttgaataactgaactagaattaagatcaaatggcacatcaactttaagtaaatgagtatctaaaaatgtttgtattagtaattttgcacatttctaattttttaaaatcagtgtttgtctctttacaataggaaagtaaatttaagcaagttattcttcagcattcagaagtcactaattagtgaagctctaccttatgaagtctcattttcatgtagtaaatttaattcatatagataaattgcctacacataaagcattgtattcactggcaacttagaagtatcatttccccacaagcctctaaaacattactattttccacatgaagtttgacagtagcttccaaaacttgccagatttgtttcccagaaagatggaaagatattgagttccagcgctgagaaatgctacaaacttactttccaggtcatactgacttatgcctctggggctggaagtgcattgcacaataaggaagccagggtggctggtgcccctcccctcccctttctactccctccccctacccttcctcctttccttttcataccaagacactaatttaacctgagttattcagaaatctgtagcagaaatctgtgtaacactccacattttaaaatttaccaaagttttgtttatatggaccagcaaccctgtgtgtatgtaattcttttatagttcttttatattggatttaaattgttctgtatgaaccattccccactagaatataagagccacaagggtaggcatttggtctcttgttctgctgattccccagaactttgtatgccaggcactgactaaataatttgtaaatagtgccattaccaataattaactaacacttacatggtacttgccatgggctaggtaactttctaagagctggaaatacatgaacacatttagccttcaaaataacctgatcaggtaggtgttgctgttatccccattttaaaggtgagagaacagagtcccagcgaggctcagtggctggtcatgggtcgcagagctctgtgcaggtggggctggattctgtgctaggatgatgctcttggcctgccaaactcactgctccctcagtgagactgctgtaccctgagtgggggctgtgtctcttcctcacagccccgtgggcctacagagcagtgcccagtgtatggcggtgcccaattgatggctgcatgctggaggatgaaggaatggtcacctccagcagggatgagcttggtggaggtgaactcttagccctcaatttagaacattcctaattccacaaagaggcaggtgtcatctgtgtctgaaagggggccagttgctggtggccagggtggggctggtatatttatatactggatgatgtgtttataaagcaactttacctttcaaagaatctcatattctagatcttacccagctacattgtaagaaagcagcttcattttcattttaccaggaggcccacattgggaagatcacacagccaagacatggtgctgggttccagtgttcccacacccagcaagattggagaggaccctgctggcccagcgtggctgagaaccatgccagtcatttggtcctttattttgtaacataaatatgtttgtatgtcagctcgatggtctttttccgccttagattttgccggcacatgcagagcaagtgtgtgtgtgaaacttaatccaaaggtcagttactatttcacagtaatgactcccaagtgtgtgagagtgtagtgagtgtgacgaggaggtcattacacactcgtgaaaaactctggaaatggaaatggttgaattcaaataaccagctggcttgttattaatgggttggtggctcgttgtttccacagggccgattgatcaaatttagccctcattcatcttcccccatcctggctgactggagaggacgccttcttggctctcagcatgcccctcgcggctgggtcacccttgtttctcagagtggaattccctccctgagtttgagatggggaatcttggcagaaaggagagcgttcggggtgggttacaccccaaccagaggaacttaggactctcaggagacgtgggtcctccggaaggggctggccaggccccccagagacgggggatgcccaagcagagctgggccccggcagcctaatcacagcaccatggtcaggatggcttttcctgctaatatgctctggccactgatctctgtatatgctataatattttgtctttctttgtcacagcctgttgtggaagagagagccttttggcctccaagatcaggtagatgctaatgctcctttctttagagatgaaaatgcccacaggaaaagaggaggtggctacctttggtcatgacgattcctgccagcgctttatggcgggcgtgcatgggcgtgaggtccgtcgtcacctcgcggaacttctgtgtgaccagctgggatatggagtctgcgaattcctgaaagacacaagcacaggcctccacgttgggctgagcaggtgccgtggaggatgatggggcactgtcctccccgtcctcacagcctcatccccatgtggccacacatgggcctgctctcctcccctcctcacagccttgtcaccacgtgaccacacacggcctctccctggctgtgcccccaaaactcagaatcatattgagtggcttatgagtggttaaccccagcattgctctcagcagaaaccctgagctctgccaacctccccatggaaacagtgtctacttcctctccctgcctctcagagcagtgactggaggagtctttcggcggggagggaatttttatagggatgatgggccaccgcagtcttctgagtattccagagccagtgtctacacagccagcagtctcagggtgctcttctggcaaaatggctggcgctgtggctctctccacaacttcttctcaccttcctgcacatgcacacagatgcacacattcacatgcaacacacaacacacctagggcacacgtgcacacacgaatatgcacacacatgcacacacacagacacacacatacacatacacgtgtgcccctgcacaccccttaacataatctgattagtgataaggtgactcctggtctctgggaagacagcacacacagtgtggctctgtggccgccctttccccggctcctctgggcccaaggctgcagcactgccctttccttgacatggggccccaagcttttcttcgggggcagtttggctggcatagccgttgcaggccttggagtagggaagcctggttggaccctcagttctgccactcaggagcctgggtgagtcgttaactcctcggagcccattttcctaatttacaagtgaatcatcttcatttccaccttatggtgttttcgtaaggattaaatgcaatacggtgtcttaagtgctcagcacagtgccccacacttggtaggaagtgctcagagatgacggctgtgactattactcttattattttcatcattatcatcatctcccccagtcaccacaggcattgcctgagcctctgagcagccaaatcaattcatcatctcatccaggaggcaggaaacagtcccttttcctggtggactgggcttccccattaccaccaggcatgtgttgatgttgatactgtgcagcattgggcctggtttccacatttccaccgggcgtgtgtggacgctgatgctgcgcaggcattgctgctgataaggacagctctctgattaataacgctaagaaagatagacagtttttaaaaatcccacttgtaggcaataaaacatgtttgtgtgaaaacagccctgcctgccagaagcaaaaaacatgccacaaaacaacctagcacctctccctcttaattcttctgcagtcaagggcagaagtgcagggcccggcgcagtctcctctgctcaccccggggtttgagggcctcaagccgctgtagcctgtaaatgatgtcagctacttttcccactgtgtcgtgaatcaatatggaagccccacataggacagattgcagatgaaaggcaccccgacctttcagggactgctgtgagcctggagtcttcctgggtgctcccagtccaggctgctcccagctgtcctgtctttcgtgtctggaatcaggtccagagagggaaacctgtgtcctggacaccccgtgtgctgtgtcctggggctgctggaaaaatacccttaactgggggtctttaaacaacagggattcatccccccgaagctctggaggcagagatctgagactgaggtgtccaggggcggtgctgcctcctgaggctctggggagccttcctgcctctcctggctccaggcctccgggcgtccctgggtggtggccgcatcactgcagtctccgcctctatccccacgtggccttctcctctgtgtctgtgtctgctcttctgcctcttgtagggacaattgtcattgaatttagggcccacttgggcaatccaggatgaggccatctcaaagtccttaacttgaggatatctgcagagaacgttttctcagtcaccgtcatggggttggacgtgtctttctggggctgttcaacctgctgcaccctcgtttactctttcaatgcatgctgtcaagggagagcgtgattcttaatttttttatttttctttgagacagggtttctctctgctgcccacgctggagtgcagtggcactatcacggctcactgcaaccttgaatttttgggctcaaatgatcctctcacctcagcctcccaaagcgctaggattacaggctccagccactgggccaggcccctgtgataacctggtcttccttggtgcccaaatcacacacagttgccatgaacgacgtccacaaggtgggtggcaggcgggagccttcgtgatggtccttggttctcccctagaaggctggctgcccacatctaaaggtcaggcctggctgtgaggttgtccggccccgcctgtgccccccacgaccttgcacgctgagagctctgagctggggtggagaagaagatgcagggggacagaggcccacagagtcctggagccccaacaggcctcagctatcacctcaggcctcgagaagtcagcttctcagcaccatgacagacggtgaaggtgacataagcagccccaccacaggctcctgcagggcgtgtgctgcaagccccatcctgccaggacctcccgcatctcccagggaaagcatccgggcacagggttgatggggcagccctggctctgggaccgggtgacgggtgggacctctgccaggcccggggctcgtgggttgccagcaggtctgggaggtggggaggcttgtgctgggccttgacttgcagtgctcatcctcaccggccctgcagaggggacagggcactgaagggcttcccactgggaagagggtctagaaagccttgtccaaagctgatgtctgagataaaccttgaaggatgagtaggagagcttccctttctcaggtgacagaatgcagactgctctcccgccggtccgccccacggcacatgggcaggcgagggcagcaccgatcagcattgctgcacaggcgtcctggactccagccacggggacacttccccagctcaggcagtggccatggcagcctgggggccacatctgtcccacggggttcactgtcgttgccagctctggtatccgattctgggtgattcatgggtgttaatgttgattcaaggacaaaactacatcttttgcttctaaaacagcttttctggtgccaggcatctgattccagcacacgctgtgctccagagttattcccaatgacgtgtgtagctctttgttttttttttaggatgaagtttcaaatgtctaagaagtgatagcttgtccagcacaggaggcctctctgtgtcactttgtgtctgcttgagaggctccagcacaggacatcaggatggtctcagaccactgagtcataacagtgcatgcaaacacagatttcactgtggaaacctagggagtgctctgtccccttagagatgggaagacacacaaacagtgacaacagggactcattctgagcaggcgcggtacctgcccaggaaggtgccaatattatcctttttagctattgaagcaacgcaaccagtcatacagcagggggtggcagagacgggacgtaccccagctgccttgaccttgacccttgcactgaactggtgaccagattgctctgaggaaaagcaggatctgaactcaaggatggctgcaggcttcactgcctctgggtgcaggctggagcagctgcggccgggacacgggtgaaggcggctggcaccccaagaaggcagtggcccttggaggggggcccgtggtggagcctggccacccactctccgcaccctgcaggcctgtacccctgccctaggctcccactatgaaccaagcagcgtgagccctggccgctcccttgtggggtcatttgaggaacagctggggtggaatgaatcacatttggtttgggcctcagcatttccacagatgaaggcctccttgactcactggggagggcttgcatggccagcagatgccaggtggagagtgatgctcagctttcttctagagtgacaagggcccctggctggtagagatggccttgaactgacagagcagaatggagatattgctggccggacagttccacccaccccagctggaggaggtgggaggtgcagctgacagccaggaggccatggcacccaggtgtgcacattcagtcctgcagggcggctccaggcagcagccatggcgccctcaagggcagggcacttcctctccccaggtccacacattcccgactccacagccagtctttctttctttccttcttttctttttttttaatttaagttttagggtacatgtgcacaatgtgcaggttagttacatatgtatacatgtgccatgttggtgtgctgcacacatcaactcatcatttaacattaggtatatctcctaatgctatccctcccccctccccccaccccacaacaggccccggttgtgatgttccccttcctgtgtccatgtgttctcattgttcagttcccacctatgagtgagaacatgcagtgtttggtcttttgactttgcaatagtttgctgagaatgatggtttccagcttcaaccatgtccctacaaaggacacgaactcatcattttttatggctgcatagtattccatggtgtatatgtgccacattttcttaatccagtctatcattgttggacatttggcttggttccaagtcttcgctattgtgaatagtgccgcaataaacatacgtgtgcatgtgtctttatagcagcatgatttataatcctttgggtatatacctggtaatgggatggctaggtcaaatggtatttctagttctagatccctgaggaatcgccacactgacttccacaatggttgaactagtttacagtcccaccaacagtgtaaaagtgttcctatttctccacatcctctccagcacctgttgtttcctgactttttaatgatcaccattctaactggtgtgagatggtgtctcattgtggctttgatttgcatttctctgatagccagtgatgatgagcattttttcatgtgtcttttggctgcataaatgtcttcttttgagaagtgtctgttcatatccttcgcccactttttgatggggctgtttgttttttttcttgtagatttgtttgagttcattgtagattctggatattagtcctttgtcagatgagtagattgcaaaaattttcttccattttgtagtttgcctgttcactctgatggtagtttcttttgctgtgcagaagctctttagtttaattagatcccatttgtcaattttggctttcgttgctttagacatgaagtccttgcccatattcacccaatacaggagcacccagattcataaagcaagtccttagagacctacgaaaagacttagactcccaaacaataataacgggagactttaacaccccactgtcaacattagacagatcaacgagacataaagttaacaaggatatccaggaattgaactcagctctgcaccaagcagacctaatagacatctacagaactctccaccccaaatcaagagaatatacattcttctcagcaccacaccgcacttattccaaaattgaccacttagttggaagtaaagcactcctcagcaaatgtaaaagaacagaagttataacaaactgtctttcagaccacagtgcaatcaaactggaactcaggattaagaaactcactcaaaactgctcaactacatggaaactgaacaacctgctcctgaatgactactgggtacataatgaaatgaaggcagaaataaagatgttctttgaaaccaaggagaacaaagacacaacataccagaatctctgggacacattcaaagcagtgtgtagagggaaatttatagcactaaatgcccacaagagaaagcaggaaagatctgaaattgacaccctaacatcacaatgaaaagaactagagacacaagagcaaacacattcaaaagctagcagaaggcaagaaataactaagatcagagcagaactgaaggaaatagagacacaaaaaacccttcaaaaaattaatgaatcctggagctggttttttgaaaggatcaacaaaattgatagaccgctagcaagactaataaagaagaaagagaagaatcaaatagatgcaataaaaaatgataaaggggatatcaccaccagtcccacagaaatacaaactaccattagagaatactataaacacctctacgcaaataaactagaaaatctagaagaaatggataaattcctcgacacatacaccctcccaagactaaaccaggaagaagtggaatctctgaatagaccaaaaacaggctctgaaattgaggcaataattaatagcttaccaaccaaaaaaagtccagaaccagatggattcacagccgaattctaccagaggtagaaggaggagctggtaccattccttctgaaactattccaatcaatagaaaaagagggactcctccctaactcattttatgaggccagcatcatcctgataccaaagcctggcagagacacaacaaaaaaagagaattttagaccaatatccctgatgaacattgatgcagaaatcctcaataaaatactggcaaaccgaatccaccagcacatcaagaagcttatccaccgtgatcaagtgggcttctttctttctgcttccttccttccttccttcccctctttctctctctctttctttttttcctttttgagacagagtctagttctgtcacccaggctggacctcagtggcatgatctcggctcactgcaacctccgcctcccaggttcaagcaattctagtgcctcagcctcccaagtagctgggactacaggcgcgcgccactatgcctggctaattttagtttattttgtactttttagtagagatggagttttgccatgttggtcaggttggtctagcactcctgacctcaggtgatcctcccgccttggcctcccaaaagtgctgggattacaggtgtgagccaccacacccggtcctttttttctttttttttttttaagtttcaacttatattttgggttcagtgggtacatgtgcaggtttgagtgatgctgaagtttggtgtacaagtgacccaggtagtgagcacagtacttggtagttagtttctcaaccccctccctccccaccagtattccccagtgtctgctcttcccatcttgatgtctgtgagtactcttatgtttatcttccactcataagtgagaacatgtggtatttggctttttctgttaattcgtttaggatgacggcctccagctgcatccatgtagctgcaaagaacatgatttcattctttttttttttttatggcatagcctgtttctcaatccattatgtcctgccctgcctcagtctctaaaactccttcctaggcccgaaaggtttcctattcccctgtttggaggtcctctccctcatctgcaatccactgcctttagaactccagcaacattcatgtaggggtcgactcatgttttttcctgcatgattacctagcagttcatgttttatggtgtgactcctatgcagtgctgcatctgtggctgggagcatggcttggatgcgttttgcattttcgtggtcctgccatagcaccatgagtgatcatggctgtcatcaacctctcgaatgaatgactgcgtgtatggataagtgaaactctcaaggatgaattatctaaaaagtaaaatttcagaaaaaagttggttatttttcccaccagttattatcagcatttttttccccaaccttttcacactgtcttcatctgctggggctgccgtaaaagaataccatagactaggcagcttaagcaacggaaattaacgttcttaatggttctgaaagctgaagcccaagatgatggtgtcggccaggtcagtttctttctgaggccttttctcttggcgcgtgggtgctgccatcttgtcatgtgctacatgaactctcctttgtgtatgcatgaagacagagcaggaccagactccatggcatcatttgtttgtttgtttgtctgtttgattttgagacatagtctccctctgttgctcaggctggagcgcagtggcgtgatcatagctcactgcagcctcaacttccagggcccaagtcatcctcttagctcagcctgccaagtagttgggaccgcagacacagggtgccatacctggctaatttttcagtattttgtagaggcagggtctcaatgtgttgctcaggctggtctcaaactcctgggctcaagcagtcctcctgccttggcctcccaaagtgctgggattacaggtgtgagtcaccgttcctggcctgtggggtcatctttaataaggacactaatccactggataagctgcctcaactccatgacctcattttgccgtaagtacttccttagggttttggacttgcttgggccctgccatcctttccttgttgcctctttctctctcttggaaagggacgtctactccatgcttggctcactgttatattttgggaacatggaacttgtttgggttccgtggttcacggctggaggggagagctcagcttcagggtgggcaaattgcaccccgagtcccacccattcctgattcaggtgaagttttgttgaggctcaggacttcacaccttagtgctgatgctggaatgagctaagacttctggggctgttgggatgggatgagtgcatttgccatgcaagaaggatgtgaatttgggggaggtcagggacaggatgttctcaactgaatgtctgtggcagcatcaccttgttggctcagagtgagtgagctcactctccggtgtcacctcttacaagaacactaatcccatcagatcaggaccccactctcatggcctcacttaacctgaactacttccttagaggccccatctccaaatacagccacactgggaattagggcttcaacatatgaatttcgggggacacaaacattagttccatcaaacaaaacatgatgtcacctgagcggctccctttctgaacccatgtcatgtgttagcctggtgggtacaccttaggggcaggcaccacttgctctctgcccctcataggctttatctagaaacatgtggacatgcaggtgtggactatccctccttccttgacacatgacatctccttgcttccagcatctaggagggctgtgtgaccagggctgcctgttgagtgctggagaaaattgtgtttgccatttttaggtgtggatcctgaaattcctaagtgatgctccgtgaaattcctaagtgacgctccgtgaaattcctgagtgatgctccgtgaaattcctgagtgatgctccgtgaaattcctgagtgatgctccgtgatattcctgagtgatgctctatgaaattcctaagtgatgctctgtgatattcctgagtgatgctctatgatattcctaagtgatgctccgtgaaattcctaagtgacgctccgtgaaattcctgagtgatgctccgtgtttgcctcctaggctcttttcctcctctttctcaatcccccgtttctctcttccctccctacaagctggattcagagaaccccaggatggagccacgagagggttggggccagggtgaaggaattagctacaggctgagcacgcacggcttatttatagtgcgccactggctttgggggccgtgggttacggcaacaatgttatttactctgagtcatagaagagagaaatccatgagaaaaagacaaagaaaacgtggcaatcaaattgaagacttatgcaaatagtgcatgaaatcttacaacttataaatagaaaatgtctctgcaccataactcatgattgatttgacatgtgtggtggatccatgatgagttggtctattgctgatgtcacacgtttggtgggtccagatgatgacctcatctccacttaggggctcttcaggcctggaggcaggtcttgagcatgtgctggggggtccccaggcctcaggaactagctcctcctcactgttctgctggccagtagaaaacatttttgttatgaaagtagccattattagggcctcacctatggaatgctagatttctgtgtgttggtggtttgtggattcaggtatgcaataggaggcccaggcaaagcaccatgcgcttatatgctttgtgctggtcgatcctggtccaatggaaagatatggattggatagctccagcacttgtttctgagaatctgtccagctctcgtgcaagtccagccttggtgaaagacaatttgcgtgatttctcagcacggtgccagcagggctcaggagcagcaccgaggggtgcacagagactgtcaccccagagtgccccagcatcctgcccctcagggaccgcagggctgcatggggaggatgtggcactaggttcctgggtgactgctctcgctacactcctaagcccaggaaacttccatgagaacttttttttccgtttaaaaagccaaccccatctcctcctctataatccttttttctttattctttacattttaaattgaggggcgcttgacatttatatgaagcatatttttcaactaacattttataaaggcaaatgtaaaaagagaaaagcaaaaatttaaaaaactttccttactttgggtggtgaactaattaaaatgtagagagatttgtagtaagctggttaaattttctctctttgatatttaaccagcgtgatttcccatgacggcttcagcaagtctcacctcctggctggggtccccacaggttggcacagctcagctccagtgataacctcactgcctgagtaattaatctctttctccaggaagtggagttagaatgggttgtgttggggtcccatttactaactgcagatcttcctcccctccctgtcctttcgagaccaccttggtgtttacgtggtgctcagagacctgaaatatttctgtgcttggccacaaacccgtcttactgataaccaacacagctttcaacacagatcttgcttttttgcactgcgtccttccatttccccagtgaagccctttccgggtctctccacagaactgtgtctactgtgccacaggtattttaagtgattggtttttaattaaatcacatacatgattgcagctctatgtagttttccatagttgaattactgtatgtaaatgatactgccattgatgacatagggtgttagaagctagacagcagcttagaattcagatagggagacatacttctttaacactagggatgtttaatgttttaatcacttgggatataatatatacagtcaactttggttactgcaaacccaactaatcagactttgcaataatgtgattttcttccccacctggcacttggtttacaggagaagcagctaaagtgctcaaaaataagcttgtgcctgattaattttttgcatgcaaattacagaatatgctcatgggcctgcaaggggttcatttcatctcctaggatggataaatgcattcagatttagtgttctgagcacatgggccaagttatattgcatggtccctttctaaaataagggaagacactttcccataacccagagaactgagttatctcattgtgtattatgaccaatccgcaccttcccatcatatctttcaattcggtgcctacgtcagaagctctacagaggctcctagggtgctcaaaaaccatgtgcttactagttccgtccacttgaacttgcatcacagaaggtagacaaacctgtgtttctctatggaggtcaaatgccagctcctttataaaggcttcccagcatgggaacccttggtgtcttacagcactttcaagctgtgtcctttcctggcataatttgtatgcttgtctttctttctcctgtacatgtcatacatgtgtaatataccacagaccttgtggacaagtggttactgtttctactgactttctattggttaataggagttctagctaaggtcattgaaatcgtgctacttgccagacactttctaaatgctttaggtgcatgttttcaattaatcctcataaaccactttataattaaggggctgcaatgatctctatatttgttaacaatcctgtgaattaatggtagtgtgcacagcttaggacacgtgtcctacaagtggctcattggtggggtgttgtccatcatgagaataactggtgtggacagcctatggcacatgccctccatgtggttcatcagaggagtgttgacgatcttgagaatgacttctgtagacagcctatatggcctgtgtccttcatgtggcttattggtggagtgttgatgatcgtgagaataactagtgtagacagcctataacacatgcctgagcagtggagtgttgtccatcatgagaataaccagtgtagacagcctatggcctgtgtccttcatgtggctcactggacttgtacagatacttgcaggaggaagaggccacttctgggtagggactgggagtggggtagtcagggaagcctccctggaagagatagtttatgtgattccttcaaagcccagaaagaatctaaattgtcagggattaaatgatcataaaaacttagtagaagccatagcctgaagcagttcagaggtggaaacatttgtttttgggataagaacaaagagtagatcagtctggcctgagtaagaatttgtgcagagtagttatgagaaattaaactgaaagggccactcactacaggagagtgtagggtctcgattccaggccaaggagttcatctgttaattcatcaaatatttatggaatgcttctcagggtcagacacgattatacctgccagggatacatcagcacagaaacaggcagagatcgctcccacgtgaagctcagacgttacccaggcacatggatgtcctttgagggaccctgaccggcagggtgacagggctgggtctgcagctgtgtgaggggccacatgtcttggtgaggacagtgatccagggcctggcaccgagggcacgtctcagtcatggtaaggtcagcagtttgttgttttgctttgcttcaagcaccctagatgtaaggtgaattatgaggatgctctcagggctaggaaggttaaactgttgcactggacctgcactatagctgttactaccgatggctgcctccacccacagcacgggtagcaccctgcgaggctctcgattgagatccctgctgggaactgttaacacattatttaatccacccaacaactatgtgaagaaccgtcccattttataactgtagcaaaagagttttagggagatttggtagctcggccaaagatctaaagcaagcaagtagttgaggcagaaatggggttgtttcaggtctgaatctgagctgtggcagcctatcttcatggacactacctgatgctcttttgaggtggattcccagaaggtctcggaaaacaaatccaaccatacactgtaaatcctcgagatatagaactcagcacatctgtggggtccaactccagtccttgagtgggagaggaaggtgggccttagagaccctcatggtctggcccaccttcagtccttgaggggtgacttcccctccagacaatatcaggaaggcataggttgccatccagatgccccagctcctgcagaggacaggtgagtggctggggaggggacgagagaggctggactgggggcaggtgagatagtgctttgcaatatagaaagccctgcacagagagactctaaaacctgttcaaaaaagcctgaataatcaacagaaaagtcatctgcagcataaattcttttttatatatgaaaaagagagacatccagctgtccccattattgttggtgatttagccatttagaaaatgcctgctgaagggtctcttggcagcggggcagggttaatgtgtcttgcaccagtctttcatgcctcccaggaaagagctcacaccgtggggaaacgcgccctcctgtgaacccttacaaagcagctcggcttctcgcagggacgatggtggtaggtgggactgggtgggtgggggttctggagaatccttggtgatgccctgaggctttgcctggcaccctcagagcagaggtttaagatacccagccttgaagctatgaatgcacaaatgggcaccggctgcacgttggaccagcaatggtcagaggagagggtgtgtggtttctcgttacacaatagtgataaccaggtgcttccagctccagggttaagtggggagttggccccatatttgatgagctgtgcattcccgtgcttaacggaaaagcaaagcaaaaggctgctctgttagctcccactttttgttgcccacattttgcctattggctccgattaccatggcaaattaccagcattattcacattggaaaatgaactttaaatgggaacattgcaagactcaaactttactcatttccaacactaatattttgaatggcatgaataaataaaatgtgctcaaatttgcagcagtagtcctcagggtaaaattgacattcagccaaagtggtgggatactaaaatccatagattataaaggagaaagcctttagtaaatattttcctgttgaaatcctgtctttgggtttatacggctgaaaaatcagaaaggttagatttgcacgtgggtggggcaatgcggaatccaggaccgttgccccgagtccccaggctcctttcccctttgaactttgtttcacagcgggggcgggtggtggggcagtgggggcgggtggtgcctcactggagagagccaagagggggcttgggagtgcagatggcagagggacgcagggccagagtccacatggaggtgggacacacctcgaagccccctctcaaacaacacaccccgtctagacccgggaagtaggagaaacactgccaggagagtccagccaaacacaaaccgaagcctccgggataatcagagaaaatggaagatgatcttccctgacttccatcttcatatccctttgtgtttctgtggaagaggcagtctctatgtcatgtaatgagccctgttttctgacaattacaataaagcttcattaatttcaaaatcagggactggtaaaaaccgatgtccaaccaaatagttcaaattatctgactatttaattattctaaatctcaaattacctaaaggcggatggcaaatttgagtgaaggcatgaaaaggaaaaatcccttattgtagccattgtatggtgggaaaagccctaaacttgggatcagaagaaccagagttgagttctgccaccaccttcccccagctgcatgaccactacggggcaattggggtctctgagccacgggttcctcttctgcaagaggcatcatcataatcactcctcaaggccaaggctctgcatcttggcacagagatgtacgcctgcagcatcctgcactcgtctcttccgtaggaacagtgctggtgtcataggggtgttaggaggttggatgacagtggatggaggtgcttagcctggtacccggcactgttaagctcagcatccagcactcaaataccagctgctgttgttattgccattatcatccaactgtgtgcaaacataacatttttttagaaaaaatacagaaataactcacccccacgtgcctcatccttcaaattaaagtaacctgtttaaagggtacattttgatacaattaagtatgcaggcaatgcagttttgaggaggcgtatgttggggtgacctttcctgtgactcacttgaagttggcctctgtcttggctaactctctgactttgctgctgctggtgaggcctgtcccccacgactgtgctcacaggatggtccccttaaaagaacctgaataacgagttgaatcataaggaaatcaaagctacatagttagccttttagagttttattcttaattcacaaataataattgtatatatgtattgggtgcaatgtgatgtcttgatacatatacacattgtgggatgatcatatcaggctgacatagccaccacctcaaagacttactgtaatgagagcatttagagtcctttcttttggctgtcctgaaatacatgatacattatcattaactatgatcaccatgctgtgtgacagatccccagaacctgtccctcctgtctacctgaaacctcgcgtgctctgacggacatcctagcccctggtaactgcctttctcctctccatttccgtgagagttctgcagccatgcacatagatgctgggtagattttggacccaaagccaaccttaggaggaaattacacatatatcagctgttccatttagtcacttttagtgaaatcatcagtctatttttggtgaggaaatgctcatcagtgaaactgcctgctcactctttaattacatgtacctttatttctgtttaaattggaagctagagtctgaggcaacagcacattcaaaggttaagttagtgtgctttggagttatgccgtcggctgtgtggccctctaagcattgttttctgatctaagcgttccttcctctctgatttcacagcttgggtgtgttattttgtgactgctgacacaaacattgtcctcgtcagactggatgcccaaggacaaggactcagtgtcactcctcattgcaatcacaacatccactgagtgtgcatggtgggcccccaccccaaagcacgcttgcctctgggtcagctcgtgcactgctgtctctgaagccctaccctaaagggaagcctgaaaggagctgagggggtgtctgtcagagccctgactgcagacaggctcggccatgcccagaacgtcacagacaccagttctcaagcatttctgcttttatttcacccccatccctgtccctcggggaaaagaatcaatcagaatttattgtgcaaggcactgatgaaatacagggcaaaataagacaaggtcctctacataaagcagcctagaatacgaaacaggaaacacaaaataccatgtgataaatggcagctgacatttctcaagggctgactgcatagcaggtgctcttccaagtaacagcgagtgtcatttctgttcatccccgttgtatccctaagaggcagttacgattattgtcctgttttacagatgaacaagccaaggctgaggaaaagaaaactccttgcccagcacacaggcagtaagttgtgggtctggaagtcacactagttccatgaggccccacaatgcgtgctgcctctgagacgctgaggagagagaagagatgccttggtcacagctcccaccctcagatgagatgagcctgcaggtaggaggcctgccatggcaaatgctgcctcttagatgaattggggtaggagaatgacccccaaactcctggagcaggcaggcagccacctgcatcaagaccacggggtacttctgtgggtcttaagccctttccccactccctgaataggggtttctgacagaggatgccgaggcactctgacatgtgacgcggttgtctaaacgctggtgtaagccaaaaataaaattctaaggccccccaaccatccaaatggacccctcttctcagccaagggcattccagagttaacctgaaaaactggttcagacatgatggaagagggggtcggacatgcctcatgatacctccctccattgtggaattcaggaaaagccaaccagccttaacatcaacaaagacctgagtccgatgagaaacagtgaccatctgttccctccaaagcctgctacccagagatctgcatggtcaaaccctggtctccacaccccttatcctaacccagaccttcctttctactgatcataactctttcaaccaattgccaatcagaaaaatgttatgacctggaagccgctgctttgagttgtcccgtctttccagactgaaccaatgtcaatcctacacgtattgaatgatgcctcaattctctctaaaatgtataaaaccaagctgtgctccgaccacactgggcacatggcgtcaggacctcctgaggctgtgtcacaggtgtgtccttaacctcggcaaaataaactttctaaattggttgaggcttgtctcagatacttttgggttcacgttggggacctggaagagggaggaggaggccttcagggggaggcctctgcccacggcaccgtcaggaagcccgagtctgccacggctgctgggtgggacagaccagggtgctcctgacgggcagacccatcccactttctgaggtggaaaaccaggcctgggcctcccactgcccacctcctgcttcctctcactggctccgtggccaggacccgttctctctgcccctcgctttggtctatgcaggcctcataccacgcattgctgctgggtgacaagacagcccacaggatccagcccctggggggaccgcccgaccttcactccacggtgggtgtgccacagccagcacgcaggagcaggcgtgttccacaccagggaggggcaggtaggcgttcgccaaacaatagcctctggcctgcggcaggaaggccctcccacgtgtgcaaggagatgcgttagagcaggcacggcatacataggcacatacacggcatacataggctggtggctgagcacagctgtaacttccagggttacagacattgaggcatttcagtcttgtgttgttagcatgttttaatccgacataattagttacagtaaagaatccatctagggaaaatgaagaaaatacggctttaaaatgaaggatctgtatagagcaaaagcagggactgagtcatacgaggctgagtctctcttggtgcctgaggctttgcaaggtcaggagctgactaccttttcccccatgtctgacaagtggattctgtcctctgcatgttgttgtttattttatgaatcagccccagccattgtccagctcacgggcacctccagcagagagtggaggcctgcagggactcacaggtgacccacgcctgcagcagagtggagaagggcctccctcctggtcggcggaaggacatcgacattgaagccagatgctggggtccccaggaccaggtgtccacacccccactgcacggatgagacaatcagcacagggaggtgggctggctcgctgacacaggctcaggcagttggtgggatgcttggaatgaaatccctatccctatgtttaaattctagctccaaaatctgggctcctgaccacaatgttagaggtgccttccaagggcttttcactaattgaggatttcaaacaagcctgagatgagagatcccacattcagccttgagcaactgagggttgacggttgtgtgtgctgacatctgtctgtctacctgttgattatgtaaagtagtcgtccacagtttcctaaatcgttaaatatccacaaatctgtttacacacattaacggtagttactgctttagcaatcaacttcaaatttgaataccattaaaacacagaaaataaactaaaaaccacattgggaagatgcatatttctgtttttttgtgaaactggtgctttctggtctactcaggaagatattttgagcccgggtttaattaggatctttaaattctcatttgtgtgctgacatgagggtgcaaacagatgaggtcctccgtttggggctgattcatggttatttgcattcatctggatttaaaaagataaaaaccagaagaatcatttcaggccatctagagaaagagattcccttggaaaaagtagttgtttcataaagaaagtaatatttacttcccagcttctgttaaattcaagaaaagcctttaagtgagcatctaaggaacgccaacccctcttctgcaaaatcaccagggaggctgatgttacacaggcctccagtgccacagaggtgggggccctcagacctctttgtcccatgactttgcccctgagtctttccctatcctgaaagcaggatctggagaacagaaatcagtggatgaaaattgccaagttgttcccaatgcacctgggtccctgaggcagcctgggtgccgctgctgagcatcctgcaggctcccagaggagcggggtcggagctccttcacagctcagtgtgtgtagaaaacgcagtcctctggtccatgttccctcctcacagcaaaaccaccagcacctctgtaatgctgtgttccctgcacaatcctgcaatatttttgtttatttacatacccgatgtccctggtggagtgaaagcaactgcatggagtgagcgccccaccaggtcccagagctccaagaaaatcctgcgaaaagtaagcatctcagacgaagccacagatggcccacctcggccgggtgaagttttaaatttggacaaacatgcaaccaagacggctcctgtggtgtcctggaggaagccgagctcagccctgcagaatgcatggtgtgtgggttccattagatttccatctggtgtctggagggcctagagaaagccaggagaggagaaggagcctgtgtttccctagagaggaccccgaggcctggctgggcagaggcttcatgcctggcactgcggcaggtcaggggctgtgtggcggcagaaggcatatcgtggctgtgtccgtggagctgcgccttccaagttaccaattccagtggggctgttcgcgtctgccaccaactttcctaagactgacctcgccagccgctcagaaagcagcgttcaccactatcggcgtgcgtgtgttaagctgacttgaccttgtctgcactgggtgtttccagatagtctgggagtgggtaggggagggcacctcactctgtgacccaggctggtctcgaactccttggcctcaagccatcctcccgcctcagcctcccacagtgctgagattacaggcgtgagccaccgcacctggctagaatcttgtttttcactcccagggagcattgaaacagagtagtcacaaaataaatgtttagaaaaaaatttaaaagttgcatatattactgtcgcaggattagtaattgtcactctactgtgaagcctttttatccccctcacttagacaaaaggcttgtgacctgaggcccttctctactgagtgattttctttcaaatcacagcatgcatagacactcagtatatcttttccgataaaattaggtatgtgttttcttcataccctgttgcaccaggaatcaaaatgtctgtatcactctcaggttccgtcgccctgaaaccttcaagttctgtcgccatgaaatcttgctgggtcttgtcactgctccacgggacaaaatgtgatgaacagaggtggttcgggtgccgcgcttctgagaggagtgacttgggtctcccggctgaggctgcgatgccactgcccgctgacggcccacttgccaggatgtcctggcctgaggacaccccaacggggaacagaggtcgaatgacgtgtggctgctcggagcctgttctccagagaaagctccttgttcgaggaaggtttctgacaccagaaatcattctggtttcttgtcagtaactggaggggaaaatccaaagcctttgttgctaagatacataacatccttccatggagagagggaaggagagagagggagagggagggaaggagagagagagggagagggagggaaggagagagggaggggagagagagggacacaggaagagatgcagagggagggagggaaaggggggagaggagggagagaaagggaggaaaggagggaaggggggagagagaaagagaaagggacatagggaaggaaagagagagggagagggagggtaagaaggggggagagggggagagaaagacaggaatagaaaaaagagggagggagggagagagggacggggagggagagagggacggggggagagggacagagggagggaaggagggagggaaagagcagggagagaagggggaagagagaggggagggaggtgggggaagagggcagagagggagaaagagaagggagggaggaagggaaggagagagagatttcaaagcagttttactcttcatgtggtctgttttagccccgtcctcctctgcctttcttcttgtgtgtgtttaaaagctattaatcagttttagaaagcaaatctctgcctctgttgtgagcatctcgatttttcttttgcattttcagggcattctcgctggaaaggctcagtcatgctggacaaactattataccagtggaagtctgtccagtttctgataaaaccaaaactaatttattttttgtttatcctccactacctttgacaaagcttcctctggagatgtgtatcttcattccccactcctttctatgtcatctctttttgttttgttttgcaactgacaaggggaaataaatctgacaccaacctcggaagatggtaatgcattcaaggcttttcttccctctcagatgtgataaaaatcttgcctaaaaccatgtccaaccttttcagcagaaagtccagatggctttgcagcctgtaaaacagactttactcactgatgcctctcggagtgtcggcagggcaatgtctttctcgcagcagaaatgcaaaacaaaagacagcatctgtggcttgcaggggggcgggggcatgggggagctgttggtcatctggaagtgcaaacaaagaaaaaacttagagcaagctcagaagagaacttcccatgaatgggaattccatcaggtgggctgcagggtgaggaggagatggatgaaaatcagctgcagtgggtacgagaatagatcatttgagatgaggaagaattcaacttttccaccattgaagatgagtgactgccgatagaatcagctctgtggtggccacatctctccatcggggtgtgcttgcagttctgttggagaaattccatttctgatgccagccatgtgcagatggctgaggctcacatgagcagtgtgtgtgcaagaacagaggcccaggaagacttgtgatgcctgggacctggcggggtgacgtggctcctcacttacccatcttcagtgtgaggatgaattcctcatttctgtcagccacagctgcacactctgagtgtgtgctgatgggcccttgactcacctgatggcgtttcaccttacagctggggaaactgattctcgaagaaggcagcagcccctcgcgttgtttgactgataaccaagcagagggttccagtgatgtcgaccctaggacttctccggctctgacatgactgtctcgcttcccccatccagcgatggtaaccgctgggtcacactgccttgcctttctgttatcttgcccccaacgtcaaagctttgctgagctcattattacacctgtgatggaattccagtcaagccatctccttccctgagttgaaaattgcttctcccctgatgccagccctaattagcgctacccaattctgacaacccatgtgcccacagcatggagtggtggctctcagccctgcctgcaaattgtattctcctggggagatttaaaaactgtcccctgccaaggccccgacctagaccaattgtgataggatgcctgggctggggccaggatgtctctgtttgtcaaagcagatttctgtgtgcagctggagtgcggagtcactggcagcaggtaagcagctggcttctgcgggaacggcccacatcctttcctggtgaaacatgttgaatatcttcattacgtgtgttcctctcacttcaggtgtggaaatgccggtgttccaggaaggccaggacaaggcctttctgtttgaggtcatggcgttatgtctggtgcagagctcgacatatgacgtttgtcgctgttggttggctgattgatggggcctggggagtgtgaatgtgacatgggatgtgggagagaaacatcagaggagctaaaagccaagaaatgaccttcaaggtgctgcaaaatcttgggaagagtgtgagagttcggtgcaggaagatatgctggggttacaggtatttacatcccaggcatgtgttgaagtggattgctgtgcacttttgacctctttaagtcatttaggtgataatcagatagaacataacaatttcaccaggaaatgttggggacaacatcagagatgtccgatgcaatttaggagaaagagtacaacggacagggaggacaagaggaccctgagtgccgctctctctggtggtgggagtctgggctctgagctgacgtgtgcgcctctgtttcttcaatgacctctcttgatacgattttggatctgcctctagaatcctgacttatttagagatcagaaatagcagaatgcatgaagggtctcattaagaatttttgctttttagaattacctaagtttaaaatacagaataatgataaatggttttattttattctttcaaaatatttttcagaaaataatctctaatatcattgaatatgggagaagtacagcttctttaagaccctgttgattcacagactgtagtaggaaaaggtggcctatgtgtggtgcagcagtaagctcttgctgtgtaatgaccatccccaagcgcaacggctcagtcagcaagcatttgctcctcactcaggagcctgtggttggactggggtggggtgatattgactggcctgtgcagcttggcttccagctgtgctgtggggtcaggcccgctccatgtgcaactccctttggatcagcccctctggagaccccttcctgtcatggtgctggcagatgtgccagggtccaagtccacctgctcaagtgaacttcaaacctctgcttattgggaccctccagtcccactggcctaagcaggatccacgtgtaagacaaacatgaatgggaggggaaagtatgttccctccacagaggagggagagaaggcgaatatttactgacctgtaatctaacccatctcaacagcttagtgtgtgcagactgtagaaaaatgtgaaggctccaggaagtctgtactaaagctttcattccccactgctggtctctcacagtagagatgctgcttaaccccattatcggaggacaggactgaaatggttattggctactgatgattccataacgtattctatgcttttccagacaactgccacattgagacacctaactggcggcagagaattgagggacaggcctggtgcatgggagtcttcctgtggtgctgtggagtacagaaggccaagtgctccatcacaaacgttgggggagggcagggggaaggggtcaggatggttgtctgcagctttgcctgggactctctgcatttagcatctttctatccacaacatatgtaatgaccccaaaactcctgggacacaatcaagtgtggaaaggaggaggccctgctgtctgtgttctaagctcaacaacataattggaaaatgggagagtagtttttagccaccctcatttctactgcaaaattcctttttcactcatccctttctccttccttactgccagaaaaaatacactccttctctgctcccagcctggctccttgctaagatgctcggtgctgtcctgcccgctgccttcagggcagtaacagtctgtcttttctaactcccatctctccagtattttatttgtgtaatctttcgtgttttccttttcttttcctcctatacaaaatacctatctaaacacaaacaaaaataagtatcctggattcaatagtatcctccaaatttaggtctacccagaacctcagagcataatgttatttggaaatagggtgtttgcagatgtgattagtaaaggatttagaaacgaaattatcctggccttagaggaagccctaaatccagggactggtgtctttatcgcagggaggaagggaggtgtagcccccgtcggccttgggtatggagggaggcgtagcccccgtcagccgtggttatggacccgcaggtgttatgtttcttcactgcaactgagccccattagctcaaagcttgccagagccaaactcaagtttttacacatccagttattttaaaaatagcccaaacaagcagatttttagccgttgaaatggtacctgcttggcattccctgtgaaaccttaccatagagctgttccccactgataaggtggggccttgtggttataagaccactggccgttcagaccccgaagagccctctgacccagagacccccgagggtggctgcgtggcatcgcctggacaaggagccccctctgaacccctcttcccagcagctcccttgccctcctctcctcttggaacagtcttaggccatgacagatgcccctgcatgcaaatctgtccaagcgccagcctcatacagcctgtgtgcgctcctgccaccggggggcacacctttttcctcggtaagccctgaaactcccccagtctagagacgcgggcacagccaggacagcagcagccatggaggcaggggctggagggatgcagccgcagcccggggcagaggatccccagccatggctggaggccaggagagagggtgggacagatgccccttagaatcagaaggaaccagccctgcccacacctggaggtcagctctggttccagagctttgagagaataaacttctgtcatttcagccacctgggtgtgctcacttgctgtagcggctgaggagctctcacaaacacagccttgctttccacttccctccctcctatttgagatagcaaaaaatggaccattctgtcatttattcatttcagaaacacacacattgtctccattgtgcctcccacatgccaggcagcaaacgaaacggacagagatctgtcattccgggagactaaaatgtagggagtagatgctattgaaaaaaataacacaagtttataaagacaaaatgaagtttctcacaatggctttgtaaacacagcttggggaaaacagccggctatgtttttatgtttttttgccaaggaaggttttttggagtggctggacttaagggtttccatggagtctgctctgggtgatcccgggggcacatcccagggctgagcagatgttgtctattgaaagtgaggttttcccttcacctaatttacagcctatatttgagatgctattgcgcttaaaacctaggcaggatggtatgcacaaaattcaccttgagggagcccagagaagacttcatagagacaggcagtagccaaactgaggcaaggaagggcctcttttttggaagaaacaggacacacgtggatggagaagacacatactgggctcaagcaggagctcccctcaagggcacgtgccccactgcagagtgcagtgcaatgctgccgactatcccatgtgcgacgggaattttttttttttttttttttttttttttttttttttttttttttttttttttagatttgcccaggctggagtgcagtggcacactcttggctcactgcagcctccacctctggggctcaagtgatcctctcactttagcctcccgagaagctaggaccactgacgtgcatcaccatgcccggttaagtttttatttttattttttgtagagatggggtttcactatggtgcccaggttggtcttgaacttctgggctcaagtgatccacctgccttggcctcccaaactgctgggatgacaggtgtgagccacagtgcccagccacaatgccatttttatttgatgttggataatgattctcccttatgatgatagtgaagccagctggaagacacatgctcttaaatgtcttgtgtgttaagaaggaaagcgtaagtgactaggagaccagatcacagggaccccagctaatctggggagtcacgaaggggccccagatggggaaacccacaagcagagcccggaaggcatcaggagcctgcctgcaaaagccaggaagtgcagaaccagtgtgcgtagagtgtgaggggcacctgcctcactgggggacgtggacgtggccacagccccagcctggactgcccctcacatgtcagcaggggtgtccttcccctgcccctggtgaagatctagcagactccaggcattagaaaattctagagtcactttaagtcgcaagcagtgactcctttggtgattttaagtgtgcagccccgtatgtcatccactagtttggacggtatgcaaatgagaactctgccctggctgatcgcctgtgtgagattctcagccctgaccacaggaggatgaggctgtgtcctgcagacctcatggggaagctgccctcccatcccacactggtgcacggcttggtgcagcagctttctgtaggacgtggagctaaggacatttcatccatcagactagggactcttctgcccctgggcttcgcctccttctgcttcctgacctcctgggttacgatgcagcagcagcctttggtttgggctcctgggcaaagagagggtcccacagtctggtcccctgtgcttccggaggccatgcggacaccctggcctcttccctgctctgtgtctccaagtgaataaagtgcagttgctacttgaatgtggctcattgtcctaacggccacttcacgcctggccatcaaccacatgctggagttacctacctcaccaggggggcccggtggaggaccctggaggcagaggtccttttccttggttccccaccatcctggccgtacccaccacacttgtctcatctcgcagggatgagattttcccactctgccctccagctgtttaaagatccttccctgttttggtgcttttgggatttttaaaaataaaaactatcatagttgcctcttaagtagtctctctgcttctcatctgtcttccttccaaacccttttagccttgctggtggcttaagttttctcacatgcaggtataatggcatctacagatggatgcccattgaaggctgccctcgcagcagggatggttcttccacatcccctcctgttcctacagtgacggctgctcccagcctctcacaccacaccacacagccaggctgatgccagctccacgccccccacaccacctctccttggggcacccccacgcctctcctcctgacattgctgggctcacacagacacctcctcctccactaatcaattccccccatgtgtgctcctataacacttaaaaatatctttcctatgttactcatgacacggtataatttgttcattcgttcaatgaatatttactgaagacctgttcaaaatgcttctttagctgcctccctgagcatagcaattgtatcttcctcattttaaaattcctcgtgggcttcatagatgctcagtaaatattcactgaaaagggatttggatttaaaatcaaaacatacagatgtgaatctgctgccatgcactgtctggctgtgggcaatcatttaccctgctcttggaggcttgtttttctcatccatgagatattacaaccccacttgttctttcaccttgatgtggtcactatgccaaaagagaggacatgtaggccaaggtgcttagaagataaagcaatatgcaatgtaagatgctgctgtgattgtcagggttgtgacatgcttctgggatcagtgatcaaggagctgaattggccctggtgtccactctattgccggaccgtggtgtcatctcccacttaaaaaccactggttctgagaggaattgaccaaatacagggcacataagcactggtcagaaagctcactcctcttggtaaaatactgaggaattacggaacgctttcttgtctcttcagttatggtactgatgataaaatcgtggcacagggatttaacaggtccacacggttatggactctgtgcgtgctaattttaaagataacaagataaaatgtttacttaattccgttaaaaataaaatacagaagtgacttaactgctgaatgttcatagagatgagaaaaattaagtggccaagcaaaagtcatcaactctggttaccaccaacagagggggatagcagcctttgatatggggataggcttgaacaggtgaattttagaacctaaatagattataaatggaagtgcttacatacattattgaaaatgaaacccatcaaaatattgaatatcaatcaatgcccaatataaaaccgttaagaaaatcaaccttaaacagaaaactttcttttcttgatgcttctctcttctctctctctctctgtccctccattcctccctccttccctccctcttcagggttcattaatttggctgattaaatactagggtgactgcttaggatttagagtaaagaccaggcatccctgagaaatcattatggatttcttgtggtttatttcctgtcattgaattttgtgctaacacctctggtataatcctgccaagtagctaatttttaacaaatagactatattttaaagcagttttaagttcaaagcaaaactgggcagaagctacagagatgttccctgtacctgctgcctccacacatgcacctgctcctctattatcaaagtccccacaattggtgaccttacagtgacacatcactaccacctggagcccacggttcacaggagggctcactctggtgttgtgcactgcatgggtttgacaaatgtataaaatgtatctcccatctagggaggagccaagatggccgaataggaacagctccagtctacagctcccagcctgagcgacgcagaagacgggtgatttctgcatttccatctgaggtaccaggttcatctcactagggagtgccagacagtgggtgcaggtcagtgggtgcgcacaccgtgcgcgagccgaagcagggcgaggcattgcctcacttgggaagcgcaaggggtcagggagttccctttcctaatcaaagaaaggggtgacggacggcacctggaaaatccggtcactcccacctgaatactgcgcttttccgacgggcttaaaaaacggcgcaccacgagattatatcccacacctggctcggagggtcctaccccacggagtctcgctgattgctagcacagcagtctgagatcaaactgcaaggcggcagcgagcctgggggaggggcgcccaccattggccaggcttgcttaggtaaacaaagcagccgggaagctcgaactgggtggagcccaccacagctcaaggaggcctgcgtgcctctgtaggctccacctctgggggcagggcacagacaaacaaaaagacagcagtaacctctgcagacttaaatgtccctgtctgacagctttgaagagagcaggggttctcccagtatgcagctggagatctgagaacgggcagactgcctcctcaagtgggtccctgacccctgacccctgagcagcctaactgggaggcaccctccagcaggggcacactgacacctcacactacagggtactccaacagacctgcagctgagggtcctgtctgttagaaggaaaactaacaaacagaaaggacatccacaccaaaaacccatctgtacatcaccatcatcaaagaccaaaagtagataaaaccacaaagatggggaaaaaacagaacagaaaaactggaaactctaaaaatcagagcgcctctcctcctccaaaggaacacagctcctcaccagcaacggaacaaagctggacggagaatgactttgactagctgagagaagaaggcttcagacgatcaaattactctgagctacgggaggacattcaaaccaaaggcaaagaagttgaaaactttgaaaaaaatttagaagaatttgtaactagaataaccaatacagagaagtgcttaaaggagctgatagagctgaaaaccaaggctcgagaactacgtgaagaatgcagaagcctcaggagccgatgcgatcaactggaagaaagggtatcagcaatggaagatgaaatgaatgaaatgaagcgagaaggaaagtttagagaaaaaagaataaaaagaaatgagcaaagcctccaagaaatatgggactatgtgaaaagaccaaatctacatctgattggtgtacctgaaagtgatggggagaatggaaccaagttggaaaacactctgcaggatattatccaggagaatttccccaatctagcaaggcaggccaacgttcagattcgggaaatacagagaatgccacaaagatactcctcaagaagagcaactccaagacacataattgtcagattcaccaaagttgaaatgaaggaaaaaatgttaagggcagccagagagaagggtcgggttaccctcaaagggaagcccatcagactaacagctgatctctcggcagaaaccctacaagccagaagagagtggggaccaatattcaacattcttaaaagaattttcaacccagaatttcatatccagccaaactaagcttcataagtgaaggagaaataaaatactttacagacaagcaaatgctgagagattttgtcaccaccaggcctgccctaaaagagctcctggaggaagcactaaacatggaaaggaacaaccggtaccagccactgcaaaatcatgccaaaatgtaaagaccattgagactaggaagaaactgcatcaactaatgagcaaaataaccagctaacatcataatgacaggatcaaattcacacataacactattaactttaaatgtaaatggactaaatgctccaattaaaagacacagactggcaaattggataaagagtcaagacccatcagtgtgctgtattcaggaaacccatctcatgtgcagagacacacataggctcaaaataaagggatggaggaagatctaccaagcaaatggaaaacaaaaaaaggcaagggttgcaatcctagtctctgataaaacagcctttaaaccaacaaagatcaaaagagacaaagaaggccattacataatggtaaagggatcaattcaacaagaagagctaactatcctaaatatatatgcacccaatacaggagcacccagattcataaagcaagtcctgagtgacctacaaagagacttagactcccacacattaataatgggagactttaacaccccactgtcaacattagacagatcaaggagacagaaagtcaacaaggatacccaggaattaaactcagctctgcaacaagcagacctaatagacatctacagaactctccaccccaaatcaacagaatatacattttttttcagcaccacaccacacctattccaaaattgaccacatacttggaagtaaagctctcctcagcaaatgtaaaagaacagacattataacaaactatctctcagaccacagtgcaatcaaactagaactcaggattaagaatctcactcaaaaccgctcaactacatggaaactgaacaacctgctcctgaatgactactgggtacataacgaaatgaaggcagaaataaagatgttctttgaaaccaatgagaacaaagacccaacataccagaatctctgggacgcattcaaagcagtgtgtagagggaaatttatagcactaaatgcccacaagagaaagcaggaaagatccaaaattgacaccctaacatcacaattaaaagaactagaaaagcaagagcaaacacattcaaaagctagcagaaggcaagaaataacaagctagcagaaggcaagaaataactaaaatcagagcagaactgaaggaaagagagacacaaaaaacccttcaaaaaattaatgaatccaggagctggttttttgaaaggatcaacaaaattgatagaccactagcaagactaataaagaaaaaaagagagaagaatcaaatagacgcaataaaaaatgataaaggggatatcaccactgatcccacagaaatacaaactaccatcagagaataatacaaacacctctacgcaaataaactagaaaatctagaagaaatggataaattcctcgacacatacatcctcccaagactaaaccaggaagaagttgaatctctgaatagaccagtaacaggatctgaaattggggcaataatcaatagtttaccaaccaaaaagagtccaggaccagatggattcacagccgaattctaccagaggtacaaggaggaactggtaccattccttctgaaactattccaatcaatagaaaaagagagaatcctccctaactcattttaggaggccagcatcattctgataccaaagcctggcagagacacaaccaaaaaagagaattttagaccaatatccttgatgaacattgatgcaaaaatcctcaataaaatactggcaaaccgaatccagcagcacatcaaaaagcttatccaccatgatcaagtgggcttcatccctgggatgcaaggctggttcaacatacgaaaatcaataaatgtaatccagcatataaacagagccaaagacaaacaccacatgattatctcaatagatgcagaaaaggcctttgacaaaattcaacaacccttcatgctaaaaactctcaataaattaggtattgatgggacatatttcaaaataataagagctatctatgacaaacccacagccaatatcctactgaatgggcaaaaactggaagcattccctttgaaaactggcacaagacagtgagagggatgccctatctcaccactcctattcaacatagtgttggaagttctggccagtgcaattaggcaggagaaggaaataaagggtattcaattaggaaaagaggaagtcaaattgtccctgtttgcagatgacatgattgtatatctagaaaaccccattgtctcagcccaaaatctccttaagctgataagcaacttcagcaaagtctcaggatacaaaatcaatgtacaaaaatcacaagcattcctatacaccaacaacagacaaacagagagccaaatcatgagtgaactcccattcacaattgcttcaaagacaataaaatacctaggaatccaacttacaagggatgtgaaggacctcttcaaggagaactacaaaccactgctcaaggaaatgaaagaggatacaaacaaatggaagaacattccatgctcatgggtaggaagaatcaatatcgtgaaaatggccatactgcccaaggtaatttgcagattcaatgccatccccatcaagctaccaatgcctgtcttcacagaattggaaaaaactactttaaagttcatatggaaccaaaaaagagcccgcatcgctaagtcaatcctaagccaaaagaacaaagctggaggcatcacactacctgacttcaaactatactacaaagctacagtaaccaaaacagcatggtactggtaccaaaacagcatggtactggtaccaaaacagagatatagatcaatggaacagaacagagccgtcagaaataacgccgcatatctacaactatctgatctttgacaaacctgacaaaaacaggcaatggggaaaggattccctatttaataaatggtgctgggaaaactagctagccatatgtagaaagctgaaactggatcccttccttacaccttatacaaaaatcaattcaagatggattaaagacttaaacgttagacctaaaaccataaaaaccctagaagaaaacctaggcattaccattcaggacataggcatgggcaaggacttcatgtctaaaacaccaaaagcaatggcaacaaaagacaaaattgacaaatgggatctaattaaactaaagagcttctgcacagcaaaagaaactaccatcagagtgaacaggcaacctacaaaatgggagaaaattttcgcaacctacgcatctgacaaagggctaatatccagaatctacaatgaactcaaacaaatttacaagaaaaaaacaaccccattcaaaaagtgggcgaaggatatgaacaaacacttctcaaaagaagacatttatgcagccaaaaaacacatgaaaaaatgctcaccatcactggctatcagagaaatgcaaatcaaagccacaatgagataccatctcacaccagttagaatggcaatcattaaaaagtcaggaaacaacaggtgctggagaggatgtggagaaataggaacacttttacactgttggtgggactgtaaactagttcaaccattgtggaagtcagtgtggtcattcctcagggatctagaactagaaataccatttgacccagccatcccattactgggtatatacccaaaggactataaatcatgctgctataaagacacctgcacacgtatgtttattgtggcattattcacaatagcaaagacttggaaccaacccaaatgtccaataatgatagactggattaagaaaatgtggcacatatataccatggaatactatgcagccatgaaaaatgacgagttcatgtcctttgtagggacatggatgaaattggaaatcatcattctcagtaaactatcgcaagaacaaaaaaccaaacaccgcatattctcactcataggtgggaattgaacaatgagatcacatggacacaggaaggggaacatcacactctggggactgtcgtggggtggggggaggggggagggatagcattgggagatatacctaatgctagatgacaagttagtgggtgcagcacaccagcatggcacatgtatacatatgtaactaacctgcacaatgtgcacatgtaccctaaaacttaaagtataataaaaaaaataaattaaaaaaaaaaagtatctcccactgtagtacacacagagcagtttccctgccctaaaatcccctgtgctccacctactcagccctccttcctccagctcctggtagcccctgatcattccactgtctccatggtcttgccttttccagaatgtcctgtagatggaatcatacaacatgtatgctttctggatggacttatttcactcagcaatatgcatttatgtttcctccctgtcttccttctttgtaatgctgactcatattccattttctggatggatgagagtttgtgtatccactggcttactgaagggcgttttcgttgctttcatgttttggcaactatgataaagctactataaacatccatgtgccttttttctgtgtggacacaaattttcaattcatctgggtaaagaccaaggagtgtgattgctgaaccatatggtcagagtatgtttagtttcataagaaaatgccacgctgtcttccacagtgggtgcaccattttgcactcccaccagcagcgactgaatttcctgttgctccacaccctcactggcatttggtggtgtcagtgttctgggttttggtactggtatcttagcattgctttaatttgcatttccaggtagctaattttccatcatataatttatttttgtgggtgattagcaggtcagggagctctttaacacagactacctctatttctattttttttagaaaggacaggataaatagagcatggaatgcacatttttctctagcactttattttctcagctggaaaagtgttggagaagtggttttctaggataaacagatgcagtttcttataaagttgattttggcaatgatcaaattccatcagattcctaagatttcctacaggggaaaagtccccaaaaaggcaatgatttttttataaaattcagttctttaactgatggatatttagactaaccgaagtccatgcctctgacagcaaaccacacagacatttttgtgtgttgggttgtaggaatttgcacttgaaggaatgatatttgggacatgtctgaggttgcctctagggggttcaagactccatacccagagggtgactgataaacattgcctgtcatgttgggtattgagcaccaaacttcatccagaaagaaatgtgccattgctggacagtgtaagattgcctctcagcggatcctgactctttggtctgaatctcaccccatgcctatagaccaaaatcctccatgccgactgtggccttgtcattgtggaaagtgccttttcagccgggcatgcactggcagcgctccctgggatacacgaggcctgtctagtgggccagggctggctcctaggttggggattctgcaagacctgtgagtggtcctgggaagtccggtggctaccactgggatgtttgtttctggcttaggtttaatatttgaaaagttttgtgaaatgtgccaggacggattattatcattccaacaacagaaatttcagcataattacatgttaacatttcccctaagcacaagcctccctggttcagggcctggcaaggcaggatgagccactaggctctggtcttcagatcctagaatccaggctggtggggctggagaagtcagccctggattttgatgggagggaggggctctctggggtgtggcccatctccctcatgaagcactgcaacctctccacttcccatttgctgctctcccggcccctattttaattcaggacattactgagattcccttcagttcccagcctctgcagctgtgtggactgccacctgcgggcacacctggggccgcatcattccacctggaatctccgtcttcagcgtcttccatccctgagattccagtttcatttcatcctttgtttccatgctctctgggtcttcatgtgtttcctttaacttctatccttcattctccaatttcatctgcttctcagtgcttgatttcaccaaagtctctatgatttcctgctgctttgtttattaagtcactcatcagatgttgaatggggcctattttggaccgagcactgtgccaggtgctgctgtcacactgagtgagcagtctgaaggtgtttgcatttacgcagaggtacaacttctgacttccaccatgcctggcactgagagacactcccagatgttaaaatattcaccagtcctggagaagcagctggcactgaggctcagcactcctgctaacctacgaagatgttggaatcaatgagaaaaacttcattgactctgaataacattccttcattgactctgaataacattccttcattgactctgaataacattccttggatgaaagaaaaacagaggaagaagagataagaatccatctaaacctactttctaagccctggaggccccagaagtgaaagtcctcaaacacaaattattttactaatttactgagcagacatttctggagagcccactcggtgctgggcactgttgcaggcatgggggtagtgatggggtgacagtggaggctgctgcgctccagtcgggactaggtcctcacggtacctctggaggggatctctgtggttgggacggggataagtggagaggggaggaggctctccaggcccctggcgcctcaatctcctgtcccgtttcactctgactctcgtttccccaaggaagaggcagggaaagaggagacaggattgtaaagacaaggagtagttttcagtaacttggattaaaaataagttgaggttaaaggttgaacttagtgacaatattttgacctacaagaatgcaaattacgtatatttcaacttaatagctaaaatgtgtgttttggagtaaatgtggatttcgattattcacatgatgttgccactggtctgccacaatctagatctggctataggcaaatgaagactgagacagcctcagtagctccagagctgggcagcatggagccgtgaagaccaatgctcatgggggtcactcaggagacctgactatagatccaagtgttgcctttaaacagttgtgtgatctcaagcaaacctcatttctccttccatggggaatggtgggcacaccagctccatgctggtgccggtcctgtcccctgccacacatgactgagtgcccacaccaggcacttgtggtgctgctgatggcattacttttgtttctggtgtcagttttgtttaggcttttggggaggaaaaagcctaacaaaaggctttccaggagcagggaatggctggggcccatgtgaagcgtctcctggtttggtaacaggtgcgatccttcagatgctccccaaacatctctaataaatgcttagtgggttcttccgggaaatgaaaaaaaaagacacctgacgttgttgtttaatatctgagtacacctgcatcttccatgttcagatactctgaactcagaggataggtgaagacctggccaaggcgcctagagtgtccccctgcctgctccatagagaccccaccacacagatgaagaccctgagtgaggagaaagcctgcaaagctcctcaaccctcccctcagctctgtcagccctgggttccagcaaagaccttgcttcttctgtctcccactgggacccctgtcactgctacctggatgcttgttcctcaagctggcacccgagctaccatctccgccctatgatgatggaagcttagttaaatgaagctctttctggagccaatgggctggatcttaagcctcccggagaatgtgagtgtaatttaggaaagtggaaggaatgattgagtctgtgtcctaatccctgagagtctgtactcactgaagtgagcagcctaatcctcctggtacctgcggactcaggatggaatctttaattaccagagtctcatttctgcttcacgagcactaccggagtagcatctgtcgctcaaataaactcatgtgaaaataaagtattaaaatcaataattcagcttggaggtgaaatggaacagaaaaataactttctggcttgcagtgtcctggatttgcaggcggcaagtttcactgactcttgcttctccctctccttggagcatgcgaaccttggtgggtgctggctggcctgcaccagagatgcagtgggggatgcagcttccaccagggtgtgggggatgcactttctggaagaaagggcaacagccataccttcttccagcagctcctgtggccacctccaggtcagagtgagcccccggcaggccccaggctggctctgaggctgatgcagcaggttcagttattctgctgtggcctgaatgtgagtttctcttcacttcatcacattttggcttcaacactgaacagatttcaaagaccacctgaagttccctgtctccaggacgtctctcctgatttctcatttctggagtgattgtgaagagagccaagtttaccagttgtttataatttcactccaggtgcggtgataagcatgcacatctccctttggctgtcacagtaaccctttgaggtaggcgctgccacgtttcccatttagaggggaggaaaaagacgcagggaggtgaggcacctgcccaacccgcatgggcaggtgggaaccagggtccaaacctggccttcctttcctgcctatctttcctctgcggaggtgtcactgccatgctgcacacagctgccatgcagtgctctgttccagatgcctgtgcctgtgacccctctgcccatgaggctgggcacagccactgctgcactgagcttttgtgtcttccattttgtgtgtttcgccatctttttatagatggtgggggatggagtggacacaagagggcggcaggagaggggtgggaagatgtgatcttggggttttctcaccatttcacctgaccagaggccagaacgtcatttggaattcttcggcctttacatccaatgatacagttggggccgttcatccattcctcaacaagcatctgctgaaggcctggtgagagccaggaaccagccgtggagtggggtgggagtgcccaggtgagtccagggtctcagggtcttatctgtgtgggggagggcccattgggggacagctttggggagaagggtgaagggggatgggccctgagtgcctctgaagtgactcagagctgtggcctgaacttctgaaagatgccccttccacctgtcccccatcgccactccttgggccttccacagccaggggtgtcctgctgcctgccagggggtccccacagtggatgacagatggcagaatgttcatgaggcctcactgagtgccaggcactgggaactaagtggtggaactgggactgcccattccaaaatgtgtctctgccattcacgagcgactgtccctttcaagtgtgggccaattgtagtgacaagagtccctgctcacagaaagcaccaatgcttccacagcagagccagccactgtgaggcaccacctcctgggataacaggggaaacacaactaaaacagggcacagggttacctctgcccagccaagatggtttcctgcccttggttagagggagggtgggagaacgacagtggccccacacaccacagagatgacacctgcacacccatccgagttaatcgaggggccttgcttgcacagtgcaaacttccattgtgcagaggtttcacagaaacatgcttgcatcaaccttccttctgaggttgtatggactcccaaattcctgtggctgtgggtcctgcctcccagcgtcctcctgcagccagctggcaatgccaaacacccacaccatgtcttttgctaactagtaatatttctgaaactcgctatgtctgaaaaccagtcacttggaacattctgcagggcaatctccagcctccactcttgaggaaggagaggcagttgtggaagccacacagcccgtgccacagctcaggagccctgtggacctgaggctcggagacatcggccctggccttaggacctactcacttaggaatctcacattctggattcttattttgaactctgtcttcccattgctctaggaaccatcataatcattttgaaaaccaccaagaggagagctgccaaccatcaacacctgctccccagcagagctgaggtttctctgcagccgcctccctttcagtaaggacatctcccctcgcaggtcaccagccctgcccacagctggactctacttgccccgtcctcctaggaagtcccttatgagaagcaaagccagacagactatagctgggggccctaagtcagcagacgggccctgccctccctggtctgcccctgcagccagtccttcctcctcctcctcctcctcctcctggtccacctcttccttcccacatcggcccttccacggccagtgcccctccatcctccccactgcccggcctccagggagacctcttcccacacttgccctggccttccggccgcttctgacccacgtgacagacctgagcttagggtttcgcaggagggtctcaaatacggcatgcgaaggtgcagagctgagtctgaggtgcccaagatgtgatgatagtctgccaaccacctgacgggagaggggcccctgagagcatctctgttagacacgacccaaacagaagcaacaaaagtgctcccggatgtctgaaagcttcagcggctctccaggaggaacatggcctcggatgcctgcacctgggctgctctgaacactgtggggttcagagtgaactcaaggccctgtctggccttagatatttcactgttggtgcaaaattccccagaatttattttattatcctaatgggaacagggaagttcacgcagagggtgtcagccgcactctccaccccttcctgatcatcacccttctcacggagagaagccgccccgaggttccaacatgacgaagtagcgtacagttaaggggtcctgggcagggagccctgagttcctctccccaccgagtctctctgggagtttgggaaagtggtcaggaggggaggccagggatgatttgagttggtgcagactcttcttcccctcagcggggtgggggcttgcagggagagatcaggaggcagctccggaagagccgagccaggcaccaggtgctgcaggtgacagggtgagggtctgcaggggctcctgggcctctgcatcagccccagccagcgcacatggcttccaaggtttccgccttcattgattgctgctggggcacccagcacggctgagtgagcgcaaagcgtcctgagcgtggcgtttggcatggctgatgtttccaagcctcccagcaagccatacatcatgaaatattgatatggttccactagactgctgcacctgacatttgatttatagctttaggtgttcttttttaattctaaacagtcaatgagggatcaaaggaaatgtcatatttgtagggctcaagctcagaggggctcctcggaagccaggaagggaggtgccgtggttgctcccacaatgggccctaccctggcctcccagggaggggctttgaggggcccctatgcaggtgaagacgccccttccctatgccccagcatctcaaatatttaccacgttaaatatcagcctccagaatattgccttcatttaagcttttcacgttccaatgattttttattatttccatcgaccaaaataaatgaagaaaatgttttagactacacttgaaagcatgtaaaaatcaataactggattttaaaagatttaaaatgtcttgaatacattcattttcaaacattttcctctgatctttaaatagcttttcttggagcataacagttttttgaaaagtcaaatatggagcattaagggtataattaccattttaattataactcaatcatcctatctgctttgcatagaaattaaggcttttatgtcaggattttgggcactcacaaatgttcaggagcaattaatgttaaaagtttaatttttttaaagactgagtgtgaactttgcagttcttaatttccttcttgctcagatggggcagcagagatgctcccacttgccgtttaatttttgaagcgagttcatttccccttccgagtcagctcccacatccctgtgacaggcggcgtcacacagcagggaagggagtggatggtgccaggctgctgggcttgggccctgctctgccgtggtgatggcggcttccctgagtccaggctcgcctcacccagcttcctcacccataacgtggccttgtcgcagcccttgccttgtggggttgctgcaggactcctgtgagtggcaacgtgcaaggtgctgatggcagtgtcggccacggtgcatgccctgtgctggcctcattattttccagagtcccctttttggtttgatctaaaataatcccagtcattctgggagtcattggttttcctcctacccggaataggattgtttaaaaaatggtacaaccgtaaatcttatgtattcagagcagtacttattagatcacaaaacagcacaaagccctgagaatctcgcagaagcagggccctctattgctgtgccctccccacaccccatgtgcactggcctggctataaagtgacaaggctgctttcaaagtctttattttgcattaatgaaaatgccatttggctaaaacttaactagattttcattgaattttgccctgagaaggaaatactaaaatgatagattttcccattgtttttccgcgaatgagtaatgtgcttagctcctcactccggaggcataaggttgcagttttgtgtgcgtgtgtctgtgcatgcttgtatgcaaaacgcagcctggacatttttctcccagttaaagccccggtctaagatctggtccatttcctcttgagctgccactgctcaggctggaaggaaaaatcatttttatgggcactgccgtggcaaaataaaataattccatttttagaaaggctgtggcgtaggcccctcccttcctgtatgtttttgctgacagccttgctctgcttcacttttagccgatttttatgttttttagttccctcacttgtgcttaaagtcttacttatattagaaaaaaatgaatggaggcaggcagacataatttaaaaataattattatgccgtatcttctataccttgtaccagataatgttccctgagacttaatcactgaatatcacttacataatcaggcataatcccaagtgtaattacaaaacatcccataatctccacgagcctgacaggcatagtcgattgtcttcgtaagttgttgtacggatttttctagaacactgagggtttcacataattttttaatttttggtgaagggaaattattaaacatttaagtgaacatgatttagttttgatggctctgggagagtcttatataaacaagatcacttctgggaagacatccctttcttaggcgctatcttctggtttgggtttggtgcaggagttggcaatgtttttggggtaagtccaattccctgatgttgctggtgcatccatctgcctctctcactccttgggcagtactgagggctccgtgcccctgggtcccccaaaagcccatcagcagggggcacaggcaggggtaggcctgggggggggtgggtcagtttgtgtggctctggtctctgtgggccggccacgcccctccattgggggcccagcttgtaggggtggctggacacatggctgcctctctgcaccccagccttcccgtcttgagcttggtacccatcccgtcacttccctaaagcctgcctactccctaccagtgcccctttactcgaccctccctcaatccccggtgtgagtgccaggtaactgctggaccctgatctataaaaacactaacattaggagaaggccctgtctcctctgactgggtgtgaagtgttggccactcataaacctgcattctgcatagctgggcaatttaagatggtgaagaatatactatacttttgttagacactgtaaaatctatgtcagtttctgctacttattattagtttcacagtaacacaatcaatcaaataaaacagcaaaaaatccacccacagagaagcgtgtagtcacaggtgacggatcctgtaacaggaacgtggtaaagcccatcatggtatgatttggtaccatttgtttatttttgcaacctcttacagcccataagatactagaagctccctttaaattcaaacactgacagctccctgcagaatttgagaaccatgcaggagtgagagagatcatgggctgggccggagggatgtgggaaagccagaccatttgctagaaacaagcagtaccatttgcactcctggtgtggggagtggtttggattcatttacttattattcatccatgcctttgtggatttctcagtgcacacatcatcgcagagtgctggggttcagattccacctgatctctctgggcactgctgtcctcgtgtacaagtggggcaacaatacttgctcattcaactcagcattgatacaaaggctgctcgagactgtgtttgggaatgccttctgtgacctctaaagtgttgtcaaagtataatttgtccctgtcagaaggaatatcggggagtgtgggaatctctcgttactgtgttggccacagttggaataatctagttcccacatctccactggagaaagcatctctcagatcacaccccacaaattcccgtggtgggtaaagggtctgccagcctccagacaggcatctgttccagcagaaaatgacccagggtagatggaccgtgctccaaaggcttatgaatgtggccagcggccttaatttctgtcgtctgcttataactccatccaaaatcctggctggagatgataaaaaaagattcaaggagctcagagtaagtgggacatgtgacctgctcagatgctgacccatgccacattgtgacagtgacgaaaacagagtgaagaataaggccagatctataggatggggctggtgtcttaggaacagacttccttacacacagagatacagcatatagtataagagcagggacaccccaaaacaatgaggaagtaagttcagtaaaggtttctaggccgactgtcacaagaaagcatgatcttgcctgtggatcatacctcaagatgtattatgggtaggtagaataaaacagaaaaatagcacagaagagcaaacatgaatgtttaccaaacttcctgggggtgggtggagaagatctttcaaagcataaaagcagaaggataagtcatacagctgacagatagatcacctggaaattaaaattttctctgtatcaaaaaccctccatcataatcaaaataaaaagcaaaataaaagacatattcagataatagctatggattagcaagatctcaaacaaaatgattataatcacatcttggttgataagaactcattgcacaaattcctcttatatcagaacttgaaaagagtctattccatgacgaatggatagctggcatttttccttctacagagtgttggggactatgcaatgcatgtttccctctttgtcttgaatgccaaggcattctgtgccctgtccgagtacctaccttagcttgtacttacttcctggaacatgacttctgggaattagacagtataaatgtaatgatgtagctgaatgcctggctagttagagagtcgccatgttgtcttttccttatgaatataaatatttcctttgtatggattcccagcagtgggactactggaccaatatgtgtaaacgtttctaaagtttttggtgtgtattgccaaattgttttgtgcaaggtgcagcccaccagcagtgtgtgcacataacactatcctcaccctctacagcattggggctatgctcatgtagaccaggcctcagctcacctcttactactcccttcccattcctcattccagcatcttcacatcttgcctccatcctcagactcacagtggcctccagccgcccaaccactcccattcaaatggaaagcatgcattgaagttgagtccctcccatgaggctggtaggatgcttcttgccattctggtgtcccatgatgtgctatggagaatggagtgagtctcaataaacatcattgtctttaacatagcaaagtagggctccccaaaagtatgtgaattttaaaagggtgaaggcagtgatttgtccaactagatcatccagatttagggtctggtatctagcatctttcaaatcacaccatgtagatgtcactttgattttaggggtgttgggcttactgaggaggccagtatctgagctcaggcaagacctcaatttcacgtcttagggtatctccttggtgaaggcaaagtgccccctctcaggctaagaaaaaccattggaccatggtgtatcagatagttcttagtcataatatatacaaatttaacaactatctgcaaagtgagaatttttccacaatgaattatttggtagctttggtgttgattttatagctgtccttctgccagagaacagcgatgctgagatttgctgtcagtctgttggtcctatttttctataatgagagatgatgtggtgagctacaaaataagagacagatgataaaataattccttaagaaaaaaatattagaatacaatgggccggcaggcaaatgataaaatgcctctttcctgttttttaagcactgtaataaaacattttggaggtggggcattgtggatgtgcagtgccgtattgtaattgtaaacagaaatgaactggcccagattcagagcctgtggcagcacagggtcattgggattcattgttcagtgggaacatattttactgtgaaatgttctgatgacattagaatgtaaagttcctacaacctaaacaacaggtttcattctgacttccatctgtcatactgaggtaccatatgactctgtagttaaaaaccagtataaataatttggaacccaaatccatcccattggctctttatagttctccccatatgatggtgtcatacagatctctcctcctacacactttgcagaagcactgtccaaatcttgcctcatggaaatcacctcttctctcttgcagagagcaagcccatgatgttgtcctcatccggaagatccctgcctatcctgcctgaaaacagcccattgagagcaaaggtgactgcactgcctgccatcctcagatacagaagtatgctactaacttttaattttaattttttagagacagggtcttcctgtctcccaggctggagtgcagtgacacgatcctagctcacagcagctttgaactcctgggctcaagtgatcctcccgcctcagcctcctgactagctgggactaaaagtgctcatcactgcgccctgctaatattttcaaatttttttgtagagatgggggtctcattatgttgcccaggctggtctcaaattccctgccttaaacaatcctctcatctcagcctcccaaagcgctgggattagaggtgtgagccaccgtgctactgatgctactattttaatatcctccttctcttaaacaaatcatcatactctgttccagggagaatttcccagctacgagggcttttgtctaggttgaaaatggcatgggttggtaagccctgtactctaatgtagaaggaaggaggctaagtaggttccatggacatcattcctgcctgtgggcatgtgtgtcccacagctgattgggaaggggaagagagaggaagggagcatgaatgagaaggggaggagagaggctctgggggaggactttgggttctcggtgagggatgagagccacagaagacacagaaatgctccctctgcattgtttccatcctgcctcctcctccctcctctgaccacccagccctggactcaggagacaccagttggtacctggtgatatttctaaataactcagggcagagaaactgcaggattcaacattcctggctgtgtttttaatgaagcccttgaagcttggtgagaggtgatgggagagatggatataatttcggatgggcactttctgttggtagaaaggactcagcccatttgttaagaaccttgtcttgggaactattttgtctttttcaaaaaactcagtataggatggaagaaaaagcccaggcttcagagcaaggtggactctagtttaaattcaaatgctgctctgaccttctgtctctctccttgtacttcttctaattctccaaactgagtatttgagttagatttcttcatgacttactacagaggtctttggtttaggcaatgtggcaattaatctaggtagtttagggagatttaccagattggagaatgatgagaaaagaagagatgatacctatgaggctaatattgaggaaggagaatacaatattaacaaaacaggcaagggaatttaagccatttggtcatttggagccattaagtgaaggaaaaatggaaaattgacagatcataagagccactggcacatcacccactgtaatacaatattatcttctatgtccagaagaatggaaagtctagaaaaaaatgttatactcgatacactctattcaagaagaaaaggtatggcatttataattatttctacccaagttacttaaggaaaaaacatttggcattaagtgtataattttaaattatttcaaaattcaagttaatgtaattgctctctttttcatgatgtacataaataagatggcatcagtagcccatacttggaacagatttgattcaactttctgtaccacatttggcaccaggagaaagctgacactaccctgatacacttactacaatggtgttattagaatcaggaaaacagtacccttctttggttggttagtggaaagtttttaaaaagtatatcagaatttcaaaaagtattgaaggttaataaaggaggaaagccctttttgttttgtgaaatgaattaacacagtaatacattcagaactgcatctgaatctgaggaagtctatctaaattttagttaatattgtcatcatcctctttatcatacttcacagattctatgggatactttgaaattgtaaaaaaaaaaaaaaaaaacactgttaggatatgtatgacgaaaattacaaaatgctgacaaaaaaatcaaagaagacctaaattaatagagagacatgccgtattcacagattggaagactgaaatagaagaaatgtcaattattccaaaattgacctatagtgtggtgcaattcttaacaaaataccagcaaatattttgtagacatagacaagcttattctaaaatatgtatataaatgtttaagtcctagaataactgaaatgccaactttaagaaaaaggagaataaagtggaaggaatcactctactgaatattaaggtttactctatagctatagtaattgatcatgtgatgttggtggatggacggatgcatgggtccatagagcagaatagagaacccagtaaaggtacaaaggtaattcagtggaggaaacacagccttaaaaaaaaaagtaaactgtaaatcccacatctccatgtcttatacaaaatcttacacaaaagtaactcaaagtagaccacagacgtaaactataaaacttttaggaaaaaataaaggagaaaatctttgggatctagagcaagatgaagatatcttagattcaataccaaaagcaccatccataaaaggaaaaatggaagaaatggatttcatcaaaatggaaagctttcattctgtgaaagattgccttaaagggatgaacaacaagccataaactgcgaggaaatatctgcaactcacttgcctgacaaagaactagtgtctagactacacaaagaactctcaaaacttatcagcaaaaacaaacaattaaatcagaaatgggcaaaagacacaaagacttttcagagaagacgatacatggatatatggataggcacatgataagatgctaaactatattagtcattcaggaaatgcaaatgaaaaccacacgaggtaccatatgagtccacacatcacggaatggctgttgtgaaaagcagtggccacaataaaggctgagaagggcccgggtgggtccctcatgccttgtctgagaggtggaacagtgcagccactctggagggatgtttattattaaactaaacgtgattacaatgcaaaccaccaattaaactcttgggcatttaccccagagggcatggaaatttatgttcacacagaaaatttgtagtgatgtttatagcagctgcgttcatatgagccccaaactggaatccgcccagatgttctttcacaggttaatgcttagacgaattgcaatgtggcttattgtggaatactactcagcaatgaaaaggaacgaaatatgaatgaatgcaagacctggatgagtgtgtgaagaattatgctgagtgaaaagacatgattccaaatacatactgcatgattgcatttatataatatttatgaaatatcaacattatagaaatggagaacagaccagtggccaccagatattaaagttatggggagtggggttggaaggtggctgcatggtcatcaaggggccctgtgggatgggtgatctgtgtcctgacagtgcaggtgggcacacaacctacacctgggataaaattacatggagctaaacaaacgcaagtacaattaaaactggggaaacgtgagcgagccaggggattgtcaatgcctgtctgtctgtgaggcgttgtgctccggctcttcaaggtataactactgagggacactgggcacaggtacatgggctctttctgtactatgtcctagaacgctgtgaatctacaattgtcagaactaaaagcttaaacatgcacttacactcacacgaagttctgggcctcacgccaaacctacaaatctgtactcttgggaagggaagctacagtgtctgctccacatgctgctcaggggttctgcaaaggacccagcctgacatgtcacagatagtgtccatgaacctccgtggacacagagtcctctaccggggggtccctcctcatgagaacatcccgaacgctggggccatgacaacttcatgccgcacctctcttcacctcttcatgaggacttccgactgcacgcctaacactttgcttccgctcctgcaccccaagtgtattctatgctctcacctcctatgttttagctgtttggggcgagggttcatatcctcacgttccagcagcactcctgcatgtactggataattctgatgttttcctagggagggactgagtagcactcccgcatgtaactcactgcaaacagtttgggtgaaatgtaaagtggaattggaagctgacttcctccatatttaaatatttctgtcactcaggaaaagaaataagaaaagtattcaaaacgggacaagaccccgggaccccatctgtttttccagctccgccttcctcctccatggagactgttcaccaggcggttgtgagacagcccctgaagtcctcccacatctttcttgtactagagactcaagcttccttctcagtcctgggagaaggaagaccatgtgggacggaggaaagcactgggcacctgcacttctgaaaacagatgcctaagagccatcgactgccattagaatatccgcacctgagaacaagctgttcattctggaggtgaattaatcatcccaaagcccgggacatagtgattctcctgtttaaactcctaacgcctcagaatatagtttctctaagtttacaatacttgctttgctgagatagtttactaatcaactctctcacaggaaaccattcgaatcgaagagagaaggcaataaaaagttaaaacagtagatatgtaaacagtaagatactcttatcttggaaaactgaatgcaagtgaatttgaccattccccccatacttggtaaaacttacccattttggtgtcttgtccacagagtgaaacacacagagaacaggaagtcactatcttcagctttactgtgctgctaggaactttgcagcacacaaggctgagccgattttaactcactaattatgatgctctggggaagtgccttggtaactgactgagtccctcactaggaaaacatcagaactatccaataactccaggtgggcacccatggaggggcaaaagtgtaactgctgaactatctgaaccattctgtgacgtgggcaaactgagaagggtgatctggcaggaaaggcgagaccccacgagggagatgaccctgtgctaattccgtttctgtcactgtctttctatgaactctgaaaagtaaccatttctgtcactgtttttatatgaacttgggaaagtaacttttctctggatcccaacatgaaatttgactatttttataaaagccgaggaagatggaggaggaaatgagcagaagaaaaagaagaaaaacaggaagcacaagaatgttaaacccatagggctccttcccacaacacagtgcctcctcacagctcagcgtctcctcacagcgcctccccatggcacggcgcctcccgacggcacggcgcctctggtagcacagcccctcctcactgcccagcgcctccccacggcccagcgcctccccacggcccagcgcctccccacggcccagcgcctccccactgcccagcgcctccccacggcacagcgcctccccactgcccagcgcctccccactgcccagcgcctccccactgcccagcgcctccccacggcacagcgcctccccacggcccagcgcctccccacggcccagcgcctccccactgcccagcgcctccccacggcacagcgcctccccactgcccagcgcctccccactgcccagcgcctccccactgcacagcgcctcctcactgcacagcgcctccccacggcacagcgcctcactgcacagcgcctcctcactgcacagtgcctcgtcacagtttagtgcctgcccacagttcagcgcctccccaaggcacagcgcctcctcacagttcagcgcctccccacggcacagcacctcctcactgcccagcgcctcctcactgcacagcgcctcctcactgcccagcgcctccccacggcacagcacctcctcactgcacagcgcctcctcactgcacagcgcctcctcacggcccagcgcctccccacggcacagcgcctccccactgcacagcgcctccccactgcccagcgcctccccactgcccagcgcctccccacggcccagcgcctcctcactgcacagcgcctcctcactgcacagcgcctcctcactgcccagcgcctccccatggcacagcgcctcctcactgcccagcgcctcctcacggcccagcgcctcctcactgcacagcgcctcctcactgcacagcgcctcctcactgcccagcgcctccccacggcacagcgcctcctcactgcccagcgcctccgcactgcacagcgcctcctcactgcacagcgcctcgtcacagtttagtgcctacccacagttcagcacctcccacggcacagcgcctcactgcacagcgcctcctcacagctcagcgcctccccacagcacagcgcctcctcacagttcagcatctcctcacagctcagcacctcacagctcagtgcctcctcacagctcagcgcctcctcacagctcagcgcctcctcacagctcagcgcctcctcacagttcagcatctcctcacagcacagcacctcctcacagttcagtgtctcaccagtactcagcgcctcctcacagcgcctccccacagcaaggcgcctccgcattctgggggcacggattgcagggaagttgcactggaggaaatgacatgcgaggaagccttacagtaacccagtcgggaaatggtgggacccacatgaagcagctcagcaggcgtggagaggcagcgcaggctccggaaatgttgaaatagaggagtcagtgtgtgttggaaggacaacacccatgacgtggagatgagcgattgtggcggcacagggacccctctatgggaggcaaggagggattctggaacccctgactgtagtcaacgaagggcagcatccaggaaattggcagttaacagcagtggagggtggaagggataggactgcaaaatggcattggcctcgaagaaaggctcttaagggtggaaaagtgggtttagaagttgtgttagggaattggtagacaccacgccaatgtgatgaaatgagcagacactacctgaaaatcaaccacgtaacgttcagttattccattcaaacccgcgtcctgtttttttttcttgaacagtgcaaacattattacatacttcaattattcttatcatcatattttgcagacattcctggagcgggacagcctcctgggagtgtttacagaacagaggggatgggattatgccagcgtaaaaatccccctccagagcttggcatgtaaaacttcgatttcattttgcttaccaagaagcagtacaaggccaagcgtagtggctcatatctgtaaccccagcactttgagatgtatgaggcaggaggattacttgggcccagggatttgagaccaggctgggcaacatagtgagacacccgactctacaaaaatagaaaaaataactggtcatggtggtgtgtgtctgcagtcccagccacttgggaggctgaggtgggagaatcacctgaacacaggtgggaaagtcaaggctgcagtgagccatgattgcaccactgcactccagctggggtgacagaacaagaccctgtcttaaaaaaaaaaaaaaaaaaaaaaaaagcaggtctgcagaagttagttgctgtgctaatttatgacatatctggttcagacacactgctctgattaaatatgaagttcacaccccagtgtgggcagcctgtggcaggtatgcagataaaggatttaacaaagcactgcgatattacatttcagcacgacagagagcatctcggcagctgtctgcattctgtgcctgctgccagttgagatgtgaaaattgtcagactatttctaaatggaaatctaggcattcacagtaatgaacatgtgaataaaaaaataaaaacctctactgttaaatttgttccagtgattcttaagagtttaaatgattaaatctctaaaaatgtatcccttgtttaagctctttcagaccagaagcaggatgccctgaccttttgaaattctgaacccactgtccatgtgcgaaggctgtggcctgacctggctgggtgcctgagtcacacccagggcgcctgggttctgtagaaaatgtctttaggctgagtgtcttggtctcctgacccttgctgggatccaggtggtggtttctgccccatcagctcccctgcacttggctgctccatctgggtcctctagtgggtgttggtctagagggttcattaatccctccgcctccctgatggctgcttttaagatctgtttattcgatggtgtgggacaaacaacatccctgccaggcactggtccctgattctggagccgcgaaccacctgggggcttggtttgttctgggaaataggactggacagaagcgtttgtaagagtgggcgggaccaggcaggggtggttatcccgatttgctgatgctcctcatgaaggctccggaccaggggctgtgaatcagggcctcagaactactaaagccaggtagaagaagtgcctttttttttttttttttttttttttctcttaaacacatttagataggacgggaatgttttccagggctggatgacctgttcaatgatgcattatctcttcccttgcatggtattttatgattttggatatttctatgacagtagggaatacctggataatcagtgaattttgcccacgttcttttgtgtgtaagggtggtaatagagacttcttcccaaggagggctgagtcagggtcgattcagccatgggccgtcctagggtgttggcaggcatctgagaggcagcaggtagaggatgtgcagctgtgagcctttcccggcttaggctggccatggtcatggcctcagggcaccatgcttggagctggtgaccttcgattgcatgatatgcaccccaagtactttagagcattctctccacatttgcatgctcactcatttatagaggatctataaatcactctattaatttgtaaaacatatacaaaaatataaatttaaaatgatgagatatgctcagacaggaataaagatgaatttcctcaacctgataaacagcatctacaaaactcccacagtcaacaccatgtgaaatggggaaatgctgggcttgtcccctgagagcagaactggggcaaagatgttggctctcaccagtgctgatggttctactcaacgttgcactgaaggttccagatgaaatgcttaaacccttagaagaaagcacagaagtaaatctttgtgctcttgctttaggcaacgattcattagctaggacaccaaaagcacaagtcatgaaaagaaaaaatagataaattgggcttcatcagaataaaaaagtttggtactttaaaggacaccattaagaaaatgaaaagacaacccacagaatgggagaaaatatttgtaagtcatatatctgatgaggcactgataagacattctcctatgtctgataatggtatgatatacccgaatacataataacattttataactcagcaataagtaggcccaaataaaaatagatcaaggattagaatacatatttctccaaagaagacatagaaatggcaaatggtacattaaaagatgctcaatatcattaatacttagagaaattaaaatcaaaactacaatgagacaccatttcacacccactaggatggctacaatcagaaagataataacaagtgttgacaaggatgtggagaaattggaaccctcatacatttctgatgggattcaaaatgatgcaaccagcttggaaatttctcaaaatgttaaatacattttaactcatcaatcctactgccaagtatatacccaagagaaataaaaacatatatctacataaaaccacatattcaagtgttcacagtggcaatattcataatagacaaaaagtagaaatgacccaaatgttggatggatcagctgacaaatggataaatgagattctggacatccatacagtggaatattactcagctataaaaagaaatgaagttctgacgtatgccacaccctaaagacaccaaacttagagaagccagacacaaatgctcacttatgtgtgattctatttacctgaaatgtccagaataggcaaatcatagagacagaaagatcagtggttgctaggggccaggggaggggaaaatgctaacaggtttgttgtgaggtcagaaaaatgttccaaaattcctatccaaagataagaatgatggttgcagaacactgtgaatatagtaaagacctttgaattgtactttaaagggtgatttttatggtatctgatttatagcccaattaagttgttataaaaatgctgagatcaaagtatcagtaaaagttctagatttttttcctttacctcagtgaatcatctacatatcgcacactttgaagactttaacacactacactagtgaattctggacccatgtatttggaattattcagagagcttttagggtttttcagagatttccttccccatggtatggtggtggctatttgaacagtttgggaaattttcagaaaagatactcctgcagttgtcagattggctgcaacacttggctttggttgacagggctcagggtgccatctgccattttcttcagtcatattcatccgaagaagtcgaagtcttaaatctgcaaagcaggcaagaatggacacacttgctgggtgtggtggctcacgcctgtaatcccaacactttgagaagctgaagcaggcagactgcctgagcccaggaattttagagtggcctggacaacataatgagacctcatctccacaaaacaataaaaaattagccaggtgcggtggtggacgtctatagtcccagctacatggggggctgaagtagggacagaagtgggaggtttgcttgagcccgggaggttgaggctgcagtgagctggtgttgcaccactgcattccagtctgggtgatggagtgagaccttgtctcagaaaaaaaaaaaaaataaataaaaaataaaagagtagatagactggctaactagcatcagttttgttttttttttttttgccatcgaacaggtgttaaatatcttttgttgattaaaaatattacagtaaagaatggcatatttttgatattttgagttgagaattcaaaagtcttccagaaagcacaagacgttggccccctgacctcagaggagagacacatcaaagagaattccccatgtgcaggactggagacttccaatgtccctcccactctaagttgtaattctgatctgtgatggcatctgtccaatagagacaccactactggttaatttgattaattcagatgagatatatcaatttatttgaggaaaaaccccaaagcttcatgtgatttgtttgactaaattgtctaattgattaagttgtaagaatttctctgattacattggaagcagagttaccgttttccctctctctagattttgagttgtccatttttccccatccccgcaatcaatgggagagacaacttgtgttgatggtggcagagccagcgatctgacaaccttcctctgttagcccagatttctggtctccagccctctcctgctattgagttttgactccaattgcaagtggccatctcagaacacaaatccctcagctcataagagaaaagtgcttgatccgtttcttattcaattgccaagatcatttcatgtgccccagacttggctgagttaactcgatttctactagcttttctcctggttttgattaactttgatgccataattgcttagtttggagtcatctgatgttacacaatctttaggcacctagtgatgctttgctgggaagaagctgtggtctcaatgtgtgccagaccctctacctttgtctaccatggccctgtgagctgggtgcccttaccatccaaattttctgcagcacagtgggtcacttgctgaaagaaggcctcacagggagagccagggttcagatcctgagttgggctcccaggtccaggacctcaaccaccacatgaaactgcctctctgtgctcagatgggccccacttaattttgagggtattttttagtctctagaggtaattttccttacacctcagcacactgtttttctcatcatattaatacatgatacctgtaataggcaaagtgtgtatgtgtaacagaaaattttgtacagaaaaagcatgcagaaaggaggctggggaaagagacgatgatgatttatcaactgcagacctcaaagtccaataaaatgaaaaggaagcagcagcccgtgagctactatctgtggggccgatggtgagaggagccgtctgaggtgggattgcctgtgccctcggttcatccaacttacctgtaatgccacagggatgctaattcctagggacaaaaaggcagcccaaacctaaaacacaattcctgcttcctttgctacccagactgatgaaatacaaacctctcaaagaaaacagacatcaagcaccccagtggtctttttacaaacgcccgtagccccattatagaaatgcttacacggcaggttactcagacaggccggaacaactagactggacacacaatgaaggttatttctgccaaggtgtgtctttaacttttcaggtaggcagtaggcaggggccatggcaagacgcagactcatgggcagaggccggaggctgttttgtgtttcctggagcagcggtacggcgggaaacatggaagaagcggcggggtggcctaggtgagtgtttagtaatctccagaaagtggaataattaatttgttaactaatgacattcgtatggaagagatcaggccgcggcttttggtcgaatacatttgaaaatattttatcaaacgccctgcttgctgtgactgtcaagtgccatgagcagcgatgtctaaagctgtcattgtgaggctcgtggactcctcactgtgcttcctacagagaaatatgcttccagagagtaggaatatttctccacacgtgggtgcacacacatgtgcaagtgtttgtatataataaatacatttatagtgtattgcatgtttatatgtgtacatatatataaatgcatttattatcattcgtatctgcaaatctggctactcacatgtaggttccttggtcaagatttataactttaatagatgaatctttaagattgcaaggccgattattttctgtgttatttgaagttttccttttacaaataaagtttcttcaagaagtcaacaatatttgtatagagttaaaattagcctcttattttaatgtttgatttttttaaagggtgtgtaacgtctttgtgaagcacctgtgtgtagctgggccattgctgcaaagggtcctcacttctgggactggagctggtcctcattcctcagtgctttgacaaaaccctcagtgcatctccagaatggcaccagaagattaactgtcattatttgtcctcacttcaaactcttcccagagcttaattctaacattttatcatgactaaaaatcatgtggggcccttgttaaaagtgcagcccaagatagtatggtttggtagctctgggttaagtgcccaggagctacattttaaacatgacacccagccaagtcttacgtgtgtgcgttacaattcaaactgtgaggtcttctcaggggcaatgggtttgtcttatttgtctctgtgtgttccagctacctgcgcctggggcagatagtacttattgaggatgtctgtgagatgaatggatggatggagggagggaatgatggaaggagggatggagggtgggagggatggatagaaggatggaggaaagaatggaggaatggatggagggagatatgcagggatggagggagggatgaagggagagatggaagaaaggatgaagggaaggctggaaggagggatgaagggagaaaaggatagaggggtggatgacggaagggatggagggaaggatggagggagaaatagaggaagggatgggtaaacagggaagaagggtggggggtgaaggaatgggggaagggtagaaggacagatggatggatggatggatggagggttggagggaggaaatgatggagagaggggtggaaagatggataagggatggaaacctgtctcctggcaggaaggcttgactgcttgcaagccactggttgggctataacaaacttgggccatcatttatatcttttctaaaacctgaggaacattttgacatgtcttaaataaggataagtgagtcccatcctaaataggaaatactctgtcacttttctctgatttcaaaagccatcaaagcagaatgtgcacatcccgattacctcattgtttctgcaccagctcactgccaggcttatcctgcttggcacatgcaaattagagagatgcctgcgttacagacccgctgcaatccccgtgtcttcacactgaatttggaattgaatagtgctaaatgggtcttcacatttggctttggtggttaatttgaccatgcatagcatgttttcatatttcttcatgacaaatgtaaacataattagctcttattcaaaaataatttggttgtagaatgcagtgatttctaaacatgtcctccattttaagaaactctaatatgcaaacattcgaattcatggagtgcataaattcagcatctattcttctcacagtgattcttggctttgggcttcactgcaggaggcctacaaacaatgggatcctgtaacgcatttaagatgttacccacttggcaataattggatgactctttaaggaatgtagtagcacctccattaaagcaattatcttgttattgtgtggctatttccatatctgtttctctggttcactgtttcttaataaatgttatcctgtttatctttgtttcctcagtgtcttaaatacccggttcctaatcaatgctttaggcatttaagggtattctcacacatctctgtatctctcaacacttctgaagcatcatgggaaacccacccctcatatttaggaaatgaacatccttacagttaggcagatcatcctgtattatgatgtacgagtaccacatagccatgggaggaaaatgaagggtttaaagactccttggatatttcttcatattataaaataagaatgacctttgcaactctacttaggttcagctgcttgtgaattatgaggggttcctcaaggaatagacatttcctagagcctcctcaccctcagaagaccacaaaacttctctgcagaaagtgttacgctttcttagtccactgaggactccctgtgtcaggtgaagttttattattgtccttagcattgaaagaattgcttgcaggatgtttcagctcatttctttccatcgtcgttggtgattctcagtggtggtaacctttacagtgcatgtgtggtctccccctctgctccgattcctgactcttttcttcttttccatctaaacagagtacacagctctgccacagataatgagtccagatagccaaaaatcaacggacaggagattaatggactgggttattttataactaatccaaataaagatttttcccttttttacttaaagatttctgtgtgtgtgtgtgtgtgtgtgtgtgtgtgttttagatataaccaagaatgaacttttccaaaggtcacttaattactaggggaaaatagaaagtggtccagatagtgcatgtttataagcatgtggtgtatgtgtgcacttgcctccatattaaatttttgggccaaataatcaagtattaggaaacacaaaatacccagagtgattctcactcaggatttagactctaacggcaagctctaatggctcacctgcatggactgcaatcagagaaggtgcacactcaccttagatggcaggctgggctcaactacaccaaatgctgggcatcccactgagtagtccagcttttcagagtggttggtgtcagtgatgccattgaaatgctcaagaaatgagctgaaacatcctgcaaacaattcttccatggtaaggactacaataaaacttcagctgacacagggaggcctcagcagaccgagaaagtgtaattttttctggagagaagttttgtggtcttctgagggtaagcaggtgcatgcgccggggttacccatccctcccaccgaggcctcatatcacctcaactttaccctggggctggagtgcagggattagaataaaatttctgatacccattgtttcatttagccactccaattattgatacgattttactatattgattttattgcatttaattcccatttcaaataccaggagaaaaggaattgggtcataaaatctttaagatatttggtcagactataaaagggggtgccattaattcacaaagaggagaagtcataggatttgcttcccaggtcttggcccagcccagccttcttcacctcgtgcacactatacacactggatgctctgctgaagttgtgttgtcacctgggactgacacgtgcttctcatggcatcatttaatactgtcatggtgctttgcaaaatggggtagaatcattggagaaaatcatcatggctgaaaataaaagcatctattttacatgagaaacattcactgaagctagtccatgtggaaggaactttgaggaagaactacattgcccaaactctacagacagttcgttaaaaatagggagtgtcttaaggaatgtggcaggcatttctccttttattcatgctggcagactgataagtgtttaaccgaacatagcttcagagcttcagcccaaatgcttaaattcactcaaccaaaagctcaactgtcttgggccgcacagtttcagtggactgttcccagttcactgagtctggtccataataactacattgcagataaacttcatttttgaaaccatttttccccatttccaatttctcttcttcagatccctatcatataaaattctcagttttaactatttcctcaaaaacaatcctgtagaggcaaaatgctgaaacaagaaaaccaggccacctagtcaagtgaggtgttgtttagaatgacgcagggttttaaaatggcaagaattctctatttaggttggcctcaaacatggaccagctagttctcaattaggcaatttctgtctgtttcataaatgaatctaaaacatgaatggaaatggtggctcctacgtgggccagctcacagccccagccttaggtcaccccccgacattttggcatggtggatagagaggtggaggaaggatttctaggctgaaagaagacaaatctgccccttcttctccatcagccaccaggttccaggttctggaaacagggcggtgggtgggctgtctgcttccttgcatgggctggagggcagggtggctgtgagctcactcaccccaacatttgtctcattcccagcagctccggaccttgagggctgatcttcccaactcttctccacattccaacaccagcagcctcggctgggtctcatactctggattcaaagcatcgcttctcttgagaggctttccttattttggttggataggatgtatctttccaagtttcagacagtgtttcctgtctgttgggtttctcctccctggaccccacactagccgggttgctcggccacgccctgtgctgagccgagatgtcttcctgccacgcctgtagctgagcatggaccccacagcccagcatagcctcttctcaggttaaccctgccccatggaaagggtgggtcaaatctgcagttttcagagctggcaacatggtgaccacgattcacacatggctaagtgcatcctgcaccttgcattgacccgaagtctacgggactaaggagaagccattttgttttgggtcccattcctgccaactgcacttttaggggaggagtcactcagagccttcgtttcattcatgtaataggttgtgaggaggtggagacaaactctggctgtatttttactgttttcactttcatcttgcctctcacatccctacgtttgctctgattacagaagggattaaaaacagataaacaaaatcaaacaacaccaaacacagcataaatatcaacccatccaggctgcagtggattcttgccaaactttgaaaattctccaagtcaatactcccattagaaaagagcttttctggccatgaaaagctgagcagcagcgatctgcagagggagcgggtgtggggctgctctggcccctgctctgaagccccactgggagctcagaggatgaagaaacatccatcgatagcaggtgccagcccacccgtgaccaagtgcagactttcaaaaaggaatgcattcccaacaatatgacacagaaggtttggaataactgcttttgatagaagttttgacggttttgaagctactctcacagcagcactcctgcattctggcttggtgtctccagaggggcaggggtgggctcacagctgggggtgggcagtggagagggaacatgccacacctgtgattatcaactttcctgtatgctgtggccccagacagcctagagccacgtgggtccggaattgaatcagcacccaccagagaaccacgtgccccacagcggcaataaccggcatccaccagagaaccacgcgccccacagtggcaataaccagcatccaccagagaaccacacaccccacagcggcaataaccggcatccaccagagaaccacgcgccccacagcggcaataaccagcatccaccagagaaccacacaccccacagcggcaataaccggcatccaccagagaaccacacaccccacagcggcaataaccggcatccaccagagaaccacgcgccccacagcggcaataaccggcatccaccagagaaccacacgccccacagtggcaataaccggcatccaccagagaaccacgtgccccacagcggcaataaccggcatccaccagagaaccacacgccccacagcggcaataaccggcatccaccagagaaccacgtgccccacagcggcaataaccggcatccaccagagaaccacacgccccacagcggcaataaccggcatccaccagagaaccacgtgccccacagcggcaataaccggcatccaccagagaaccacacaccccacagcggcaataaccggcatccaccagagaaccacgtgccccacagtggcaataaccggcatccaccagagaaccacgcgccccacagcggcaataaccagcatccaccagagaaccacgtgccccacagcggcgataaccagcatccaccagagaaccacgcgccccacagcggcaataaccagcatccaccagagaaccacacaccccacagtggcaataaccagcatccaccagagaaccacgcgccccacagcggcaataaccagcatccaccagagaacaaagtgtcccgcagtggtgataatcagcatcaggcagagaaccacatgccccaaagcagtgataaccagcatccaccagagaaccctgtgccccacatcggcaataaccagcatccaccagagaaccacgtgccccacagcggcgataactggcatccaccacagaacaaagtgtcctacagtggtgataatcatcatcaggcagagaaccacatgccccaaagcagtgataaccagcatccaccagagaaccatgtgccccacagcggcaataaccagcatccaccagagaaccacgtgccccacagtggcaataaccagcatccaccagagaaccacatgccccacagcggcaataaccagcatccaccagagaaccacgtgccccacagtggcaataaccagcatccaccagagaacaacgtgccctgcaacggcgataatcagcatcagccagagaaccacatgccccacagcggcaataaccagcatccaccagagaacgacgcaccccacagcggcaataaccggcatccaccagagaaccacgtgccccacagtggcaataaccagcatccaccagagaaccacatgccccacagcggcaataacaagcatccaccagagaaccacgtgccccacagtggcaataaccagcatccaccagagaaccacgcgccccacagcggcaataaccagcatccaccagagaacaacgtgccctgcaacggcgataatcagcatcagctagagaaccacatgccccacagcggggataaccagcatccaccagggaaccacgtgccccacagcggcgataaccagcatccaccagagaacaaagtgtccctcagtggtgataatcagcatcagccagagaaccacgtgccccaaagcagtgataaccagcatccaccagagaaccaactgccccacagcagcgataaccagcatccaccagagaacaaagtgccccgcagtggcgatttccttcaggcggaatggggctcttttgtgataactttttcctgagccactttcaccctctcactcttctttctgatgtgtgcaccccaggctcattgatcatggtattgctacattttctttcagccaggttttgtctggaatttagtcagaactatgctgcagctgtgcaggaatgtgtggttggctggcagtgcccacatcttggggtgtcccaacctcctgctcactctcaaagatgggcagttacagtgaagacagtgagagtcaaatccagcttttcatgaatttttaaccctctgcctggatgtcccattttatcattaaaaccaccctgtgatagacccccttcctcagcttccccatgccatggagaaggctgaggcaagtccctcaaacacacacatggccccacagaaccaggactgacaccaacagggccttgactctgaggcctctgcccaactaccatgcacgccgcttggttgtctgctcacattaaacattacagcatcgagaaacattcagggaacagtgactcctgactcctgcagtcttcttcaggtggccattcctagggagaaggaggagctttgggaagccagtctttccctctctcctcctcttggagatcgcagacccatgggaggagagtaccctgagatgctctcagacatgggtggggtgggggtggaaagtctcagcctcatccagccctgcctgtgatgggctagcacttgaggacatcagcagcactctggctctgagttaggaaacctaccgccccaatcgttcagccaccttttctgcatctttgtccacctgactgtattgcaatggggtgacaagctgattaggaaaagaggtcttttgctgtgatcagttctcatcttctctcccacatttattactctttttagttagtcctttttttgaacacaagtctcctccctgcatctcaaaaacaagagccttgtttgtgaatcacataagaaagtgatctccaaattggggaatgcacaaaagttggagaaaaatgttggaacttcaacttaagagacttgtatgataaaaaatgcttttgcagacacaagaacagggtgtggtcatgacctgctggttcccaacaacacaaggagaaagaatggagcataaaagacagatctagggtgaagagaaatgagatctatacacaagacatgaagttagtcagggcttttctgacattggaagtcataggaagcctgtacataaaaaccaggttttcaaacaaccccataaaaaagtgggcaaaggacatgcacagacacctctcaaaagaagacatccatgcagtcaataagcatatgaaaaaaagctcaacatcactgatcattagagaaatgcaaatcaaaaccacaatgagataccatctcacagccgtcagaatggctagtactaaaaagtccaaaaataacagatgctggcgagaaaaaagaatggaatgtaaattagctcagtgggaatgagctagtgggaatgtagattagctcggccattgtggaaagcaatttggcaaattctcaaagaacttaaaacagaactaccatctgacccagcaaccccattactgggtatatacccaaaggaatataaattgttctaccatagacacacaggcacgcgcatgtccatcgcagcactattcacaattgcaaagtcatggaatcaacctaaatgcccatccattgtggactggatacagaaaatatgctacatatacaccatggaatactatgcagccataaagaagaaccagatcatgtcttctgcaggaacatggatggagctggaagcccttatcctaagcaaactaatgcaggaaaagaaagccaaatatccatgttctcacttatatgtgggagcgaaacactgggcacctatggccacaaatgggggagcaacagatactgggaactacttgagggtgaagggtgggaggagggtgaggactgaaaatccacctctcgggcactgtgctaatcacatgggtaacaaaacaatctgtacaccaaacccccacaacacacaatttacccatatagcaaacctgcacatgtacccttgaacctaaaataagagttaaaaaaactcaggttgtgcaggaggcatctgtgtgattgagcagggctgggtcctcctaatcatggctctcccacctgtggccgtgagtcctcacccaagccacctgcctcacaggatttgggtcccatttctgtaagataacggacagggtcaatgtttctaaaattctaccggcatccgatttactcatcaaaccatcagaccaagctacaaggcagggaaataggttcctttgttcagcagcgagaggactcagtcaaggtcatgtgtgaactcttggagcctgcgtggccgtcgcggcaatgacctggtgagaaggtgatgcctcagcatgcccaaagctgcatggcaggagaaggaagggctcagaatatttttcctggtgttgtttgggaataaccctgcctttagtaaagaattaaagttacacttacagagggaaggtaaaaggcaagaattgtcacaaagcataaatgggcgctgaacgctgagtataagaggggagacgcctgggcaggtgacctgacccgccaggccgctgcaggaggccgaccccagcacccttctggcagccacagggagtcgcacacggaccccatgcctttcacagactgtttcccaggaggcaaaatgtcagcaactggtgctaggagggtggtcagagtgaaagccgtggacatggctgtgacttctgggacgggcacggcgaggcactctcacacacactgtactgtggggccccaaataaaccaggaggttggcgtcagcacccacattctatgaatgggcaggagaggagccctcagcctggctgtgctgggggttgggccaggcccacacccgtgtgcccgctgtttctccatgtggccttcattgtgtttccgagctccgtgcataatgtcctccccggccaagaaataaaacagactgtgggacttggtggcaccaaagaggcaggtggccccctcagggaacacagctgcccagaagggcacatggaggaaaccgccgcagcctggcaggtgagccaggagggcacgtggagggaaccgccgcagcctcgggtgtgagccaggagggcacgtggaggaaaccgccgcagcctggggggtgaggatgcttcactcttatgccagacccacctgtcacggtggtcccccctcacgaggcctcgtcagacccagaatggtgtcagcatgggctggactgcacagtccagggactctttcatgggccaatgccctctgaccttagaggtgctcagagaagctccctcctttggaaaccctggctgctccgcaggtgaggttgctcagagtctgcatatgttgctccggacacccagctggcaagaggcagagccaggctcaagtccacatcctccagcttcccagaaggctttcctttggttccatcagaatggacacaccaggaccttttcggcaccctgtggacactcctgtgaccacagttgtcagagctcaactgaccccatgtcctcctgcccttgggaactgagccagcccagcctcatgcacacggctctgctggtgacctggattcccatctggggagctggctggacagaagggctgctgctgtgtttccccccgtgactctgatagtgaggacagcaccccttcttttttgagggacaggacaagaattgtagggtcatgtacagaatccacatggacgcatgactctgcccctttcagtctattcttagcatttgaattcctgtttcttggcattgaaatccagaacaactttgcatggatgctgcaggccgacacgtgtgcttgatggaaggatattcacttagatttctcagtttagataactgaataaagcctccacaccaaaccctgcaacctgagagccattttactaaacacttttcattttactaaaatcatcacaaatgaaccgtggttaaggcaaaagagagactgccggcagaggatgccttccaccactgtgtgtattatcatcatgatcagaaggaaaatgccctgtatttttttaaagacccattcacacttagtgtttgtatagtaactgttgttctgttcgcctttaattttgaatacttgagtgaattcacaattccaccgtgtgcattaatttagaaaaatgcattttaaaaacctttaatcgtggtgccgttgttacaaactctcattccactttattactccccatgcaccgacagggtctcagatgtatgggtgagagagtggccagaatgtggcagtgaaggagatggggcttgagattgggaataacgagttcgtctctcaccaaccgcgagaacccctcagcccctcagttcctgcccctcttgtgggtgctgtgaacacaggtgccctccaactctggggacctgaggttgtcaccgcgctttacttaaaaatgcagcatatgagacagttgttgttgacaggggcatgaactggctttcagtgttactgagtcttgctcttcagaatgatctgggagcatttgtggggaggaagacataaaatgcctcgagatgtggcatatttaaacagatttgacccccagccatgctgcaggctccagcctttacagaggcacttggtactagggaactaaaggcaagagcaaggccatcagaggcagagatgccaggggtgccccaccccgtctcctgctccagacactacctggggcagcaggccgggagccaggcccatgtcaggcgagggcacgtgggtccttgccttctcccatctgcccagggtcctctgtttcccattggtttggaaagctagaatttaatggaaaatactacaggagtgagaaaatataagctccagttttgggcaaaatgctgcagattgcatgtcaatggggacgtgtgcctgtttgctgctcttcaaatgttaccaagaaagcagcccccagcatatgtgcccatattggatacatcatgttgacctatggacatcttaacacgggttctattttctcaggatgtgagaactgcatgtgaacattccatcacagatccttattttcaagatgaggaagtgcaggcccagaggggcccaggactggcccattcccttcggttctgctctgacttcccagccccgcacgccagccctcaacgtgttactccagaaatgggattagaggagctcgtctggattttccctgaaatcccttctccctttcccgccttcctgatcataaagttgcagtgagtcgtgtcagaggaccgaggccttgtctccccagccggcgtccctgggacaagaatgagattgccaaatgccactctgagcatggttcatgcatctgcccgtttcattctcccagctgctctgtgagcgactgcttttggtatcatctcatttaggaatgagaagaaaccagggcacgggtacttggcactcaagggcttaggtcccacagctggtaagcagatgcaggagactggctctggagactaagctcaccaccttctccagggctgtggatggcagccgtgtgacctgtcccctgcccaggagaccactgaagagcacacagatcaggagccaggaggcctcagccctcacctcagctcttcacgcccatcggctacgagaccctcagtaagaccacgggtgcctcgacccggctggtgcacaaggagcacagccatcaacgcctcccgacagcgctcacaggtaacgccctcctctggaccccacgtacgcagtgcaccgaaggcacccccagtggacaccaggattgctgagaagggagctgaaataggctcagggtaattgggagatgaatgggaagagagaggcagtaagagatggagggaggtagagagatacaggaacagagagggatacggagacagagacagacacagagacagagatagagagagataggggtggagagagacagacagagacggagacagagagatactgagagagagagacagagacaaacagagacagggaccgagagagacagagacagaagagggagacagagacagagcgaaacagagacagtgggaatgtgaatcccgggcccctgcagggctatctcggtcctgtggtgcagtgatttgctgagcacggggtgtgccctgcattgctgggggctggggtgggagtggctacaaagtcatttctcatgggaggaacatttccctgttgtttctaaactctcaggaaactgtctgatgtctctaaagaaaccactgttgcctgtgctcgtggaaagctgattcaggaaggggtctggggagtctgggatgtgggtttcctgggtgagcggttgaggggcctctgtggtgactctgagcctacaggtcttgctgctgctgccactcctgggctgtcaggcgacgcctgagccctggagcctgtgactcttgccagcctgagcagtgcttgctccctgcggcgttggcccagactctgtctggagtgggtggtctggggcccttggccgggaggtgcctccctcggctgcctccatctgaggccctccctgcagctctgccccctaccccttgtgccctgctctcctcctcccaccccctctgctctgtctgctgtctgtttccaagggaacctgagttgacatggggagaagcagaattaagggctgtgaaggccccgagatggggtccaggtcccgactgctggctttgggctctatctgggcaccctgagactgtgtgaggatggccgggctgctgctgaggccaacgctgggagctgagtgcccatgcaccccagggctgtcccctcagtgagcccagcacccatccacctcagctctggggctcatgggaggcacaggcaggcatgcaagcgacagcggcccaggaagtcaccaggtgctgcgagaacgatggaaagaggcctgtgtgacaatgggggaaggagagagggctcaggggagagggctcaggggatgggactatggactcaggggaggtgtcaggcctctgagcccaagctaagccatcatatcccctgtgacctgcaggtacacatccagatggccagtttctgccttaactgatgacattccaccacaaaagaagtgaaaatggcctgttcctgccttaactgatgatgacattaccttatgaacgtccttctcctggctcatcctggctcaaaagctcccctgctgagcaccttgtgactcccacccctgcctgccagagaacaaccccccttcttcctttacctacccaaatcttataaaacagccccacccctacctcccttcgctgactctctttttggactcagcccgcctgcaaccaggtgaaataaacagccatgttgctcccacaaagcctgtttggtggtcctttcacacgaacgtgcatgaaatttggtgccgtgactcagatcaggggacctcccttaggagatcaatcccctgtcctcctgctctttgctctgtgagaaagatccacctacaacctcgggtcctcagaccgaccagcccaaggaacatctcaccaattttaaatccagtaagtggcctcttttttactctcttctccaacctccctcactatccctcaacctctttctcctttcaatcttggcgccacccttcaatctctcccttctcttaatttcaattcctttcatttcttgtagagacaaaggagacacattttatccattgacccaaaactccggcgctggtcacggacttgggaaggcagccttcccttggtgtttaatcatttatggggacgcctctctgattattcatccatgttccactgatgtctgatctccgtggggaagcctgccttggtcattcacccacgttcccttggtggcaggtcaattgtggggacgcctgccttggctgctccccacaaccaattctccatgcctctacccttccctttaaacttgcctccttcactatgggcaactttccaccctccattcctccttcttctcccttagcctatgttctcaggaacttaaaacctcttcaactctcgcctgacctaaaatctaagcgtcttattttcttctgcaacaccacttggccccagtacaaacttgacaatggctctaaatgaccagaaaacggcactttcgatttctccatcctacaagatctaaataattcttgtcgtaaaataggcaaacggtctgaagtgcctgacgtccaggctttctttcatacatccctagtctgttcccaatgcaactcatcccaaatcttccttctttccctcccctcagtcccaatcccaagcgttgctgagtctttcctctttccaatcttccttttctacagacccatctgacccctccgctcctccccaggctgctcctcgccagaccgagctaggtcccaattcttcatcagcctccgctcctctacccaataatccttttatcacctcccctcctcacacctggtctgacttacagtttcgttccgtgactagctctcccccacctgcccagcaatttcctcttaaaaaggtggctggagctaaaggcatagtcagggttaatgctccttttctttacccgacctctcccaaatcagttagcgtttaggctctttttcatcaaatataaaaatccagcccagttcatggctcgttcggcagcaaccctgagatgctttacagccctagaccctgaaaggtcaaaaggtcatcttattctcaatatacattttattacccaatccgctcccgacattaaataaaactccaaaaattaaattccggccctcaaaccccacagcaggacttaattgtacacctcgccttcaaggtgtacaataataaagtagaggcagccaagtagcaatgtatttctgagttgcaattccttgcatccactgtgagacaaacccccgccatatctccagcacgcaagaactggaacgcctgaaccgcagctgccagggtttcctccaggcccgtttacccgagaagcttgctacaagtgccagaaatctggccaccgggccaaggaatgcccgcaacccaggattcctcctaagccgtgtcccatctgtgcaggaccccactgaaaatcagactgttcaactcacctggctgccactcccagagcccctggaactctggcccaaggctctctgactccttcccaaatcttctcggcttagcgcttgaagactgacgctgcccgatcacctcagaagcctcctggaccatcacggatgctgagcttcgggtaactcacagtggaaggtaagtccgtccccttcttcatcaatacggaggctacccactccacattaccttcttttcaaaggcctgtttcccttgcctccataactgttgtaggtattgacggccaggcttctaaacctcttaaaactccccaactctggtgccaacttagacaatactcttttaagtactccttttagttatccccacctgcccagttcccttattaggccgagacactttaaattatctgcttccctgactattccctgactattcattgccgccttttcccccagttcaaagcctccttcacatcctccccttgtatctccccaccttaacccacaagtataagatacctctactccctccttagtgaccgatcatgcacccctcaccatcccattaaaacctaatcaccgttaccccactcaatgccaatatctcatcccacagcatgctttaaaaggattaaagtctgttatcactcgcctgctacagcatggccttttaaagcctataacctccccttacaattcccccattttacctgtcctaaaaccagacaaggcttacaggttagttcaggatctgtgccttatcaaccaaattgttttgcctatccaccccttggtgccaaacccatatactctcctatcttcaacacctccctccacaacccattattctgttctgtatctcaaacatgctttctttactattcctttgcacccttcatcccagcctctcttcgctttcacttggactgaccctgacacccatcaggctcagcaaattacctgggctgtactgccgcaaagcttcacagacagcccccattacttcagtcaagcccaaatttcttcctcatctgttacctatcttgtcataattctcataaaaacacacgtgctctccctgccaattgtgtccaactgatctctcaaacccaagcaccttctacaaaacaactcctttccttcctaggcatggttagatactttcaactttagatacctggttttgccatcctaacaaaaccgttatataaactcacaaaaggaaacctagctgaccccgtagatcctaaatcctttccccactcctcttccacttccttgaagacagctttagagactgccgccaccctagctctccctgactcatcctgacccttttcattacccacagctgaagtgcagggctgtgcagtcggaattcttacacaagagccaggaccgcgtcctgtagcctttctgtccaaacaacttgaccttactgttttagcccagccctcatgtctgcatgcagcggctgccactgccttaatacttttagaggccctcaaaatcacaaactatgctcaactcattctctgcagttctcataacttccaaaatctactttcttcctcatacctgacgcatatactttctgctccccggcttcttcagctatacttactctttgttgagtctcccacaattaccattgttcctggcctggacttcaatccagcctcccacattattccagataccacacctgaccctcatgactgtatctctctgatccacctgacattcaccccatttccccatatttccttcttccctgttcctcaccttgatcacatttagtttattgatggcagttccaccaggcctaatccccacacaccaggaaaggcaggctatactatagtacaagccaccagccctcctcttagaacctctcatttcctttccgttgtagaaatctatcctcaaggaaatcacctctcagtgttccatctgctattctactactcctcagggattattcaggccccctcccttccctacacatcaagcacggggattggcccccgcctaggactggcaactcttaagtccctcttagagtggatagatgatctttgctggcagaagacccttcaatactttcaccctgatgaagttctattctttcccattcttagggcaccctctacctctccccagctatctccaccacactatcaaccttacccattctctcctagccgcttctaatccctccttagcgaacatccgctggctttgcatttccctttcttccagcgcctacacagctgtacccgcttacatgcagaccgggcaacatctcttgtctccctacacttctgaacttcctttaacagccctcacctttaccctcctgaagaactcatttactttctagacaggtccagcaagacctccccagacatttcacatcagcaagccaccgccctcctccgcacttacttaaaaaacccttctcattatatcaactctactccgcccatatttggacctctcacgacacaaactactattcctgtggccactccgttatgtatctctcagcaaagacccactggaattcccctgggtaacctttcaccttctcgatgttcctttcctcctcatctccaaagcccaactacacacatcacagaaacaattagagccttccagttccgtataacagacaagccctctatcaatactggcacacttaaaaaccagtagttattgctaggaagacaccctgtatttcactccatccttggctaccttccccttgctcatcagactctcctcccatgccctcttcttgtttacttatacacagccccgtaaataacagaggttgctcgtagacactcgaacaaaaccgtatccaggccatcaccaataattctacaggactattccacaatatcaccccttaccacaaaatcatccttcagcttaatctctcccactctaggtttccacgccacccctaatcctgcttgaagcagccctgagaaacatcgcccattatctctccataccacccccaaaaattttcgccgccccaatactttaccactatttcgttctatttttcttattaatataagaagacaggaatgtcaggcctctgagcccaagctaagccatcatattcgctgtgacctgcaggtacacatccatctggccggtttctgccttaactgatgacattactttgtgaaattccttctcctggctcatcctggctcaaaagctcccctgctgagcaccttgtgacccccacccctgcccaccagagaacagcccccctttttcctttacctacccaaatcctataaaacggccccacccccatctcccttcgctgattctctttttggactcagcccacctgcacccaggtgaaataaacggccttgttgctcacacaaagcctgtttggtgtcccttcacaggtacgtgcatgaaaagaggagcctcaggggatgtgacaatgggcgaaggagagggggctcaggggagagggatcggggagcagggccctcctgggcatccttgggatggggaaggtggcaccccatgtgctctcccacatcccctctcctctctcggatgcacctctttcctttctctggttcatttaaacgttggcttttcccagttgccatctcctttagctgaccctgtcctttttggtgtaatgatgagtcccaaaggaagggggctcagccatcctaatggagccattgtctaccccagggaggctgtaggctctctgcttacagagccaccttcccatggggagcaagaccctctagcctctgagctccatggaggtacccaaggcggcaccagcccaggagggcagtggagcccctgcaggcaggtgacccgatcctctccagcttgcacctccctgagggctcccacgaggctcccatgtgttcaggagtctccaaccaccaggacatgatgcccaggtatgtgtccctcccctggctgcccacctcctcccacacagtcgggctctgcagtctttcaatcaactcttccctgccagtcagcccaccgtggtttctccctgtttggaactaataacaaacactcttgtcactcttgctgtgctaaatcatagacctctattttaatgaacagtgttctgtgtcctccatcagcctaaagcccttgggggctgggaggatggagcaggctggagtcttgaggatgagccccagccccacagaagctgagctctgctgtctgtaactgtcctccctgctccacccctcagtgactagactttggacgtgggactcaggtctccggaaactcaacgtccttctctgtaaaacagacctcaaaaattttaaatgagcgttactgtgcatgtaaagcacgtagaataatgtgtgacccagattaagtgcctgggaaatattagctgctaatggcactgttgttatcatcagtaatcatggctgtggaatagagacaagtggtgaagcttggctcacaggccctgcttaactaatggacagtcatattaaccatatttgaaaattccaaacatggtattgggaacctataggcttaaatacttatcagttacatattacaatttcacctaacatgttttagtaggaagtagggtggcagaagctattatataaatgtatatcgtacattgcatacattgtataaacatacattgtgattgcatgtacattgcataatgtatgctgtacattgtatatatgttgtgtaaacatatcacaattgtatatacattttatacatatgttatagaaatatatagcatacattgtatatacattgtatacatgtatagtgtataaatgtatatcatacattgtatttacattgtataaatgcataaatgtattgttaagcatctacaaagcctctagtgcctcattaaggaaggattttctgaaagtttttttttccatgtgtaatgacaatgagtgacctctcgctctttttctggccgtcagcacctctttcacagacccaggacacgaagaaagccagaaggtttggggatggctggatctgcaggactgtttttccttccctaaaagagcaccttgccttcctgcatggaccacaggatggtgtgtgtggccacaaaacccagaaggtgaggtgctgaaagaaagcaagctgctgggatcattcctgcttcaaagcaggtgatgtggccacaggcgcatgggaagaatggtcccagagacacaggcagccagctggggtggaagggcgtcctggggacccaccccctggagggcttcacagagaacagaaccgcctggggtgagctggtggaaaacaacagaacttcacacagccccaacgatccattaccaggacccagaacctcagcttcaacgaggctctgcttgtccccagtgactgaagcctcccagggcacttagctgacctggggatgatggaggggagttggggctttcatgctggccttccagggaagccttagggctggcccaagtctggaggaaaagctgcatgtaggagtgacaccatcttaaagcccattctttggaagccatcatgatgaaaaatggcacacactgttcttcaatctcacctccctccagccttctcaagcaaagcaacaacaacacactcatcaccacttctaagacacgagaactaacttcaaacaagccaattgtgaaatcctgatttttctccttaagtaagttatggaattattgaaaaccattaggaaggaagggctgattcctacctaactggtctctcttcagtcttctccctgagttacacactgagacctttgccacgacagaaatgacgttcgttttaaccccggattcctgggctttatggtcaggagggttcttctagggcccccactcacagcaagccctttgtaattttacacgtaagtgaaatcaacagtgactgtctgcacagggggttaaaagagttcctgtcagcaaaagggcagagacgtgaaaccgaactcaggacactgcaaagatgcttggctcctggcccacttgtgattatccctcctccattcgatttattcacaaagtgagtgagactgaatggctggtttctagccagaggggacttcaatatttgagtgagggagacaggaaaagacccaaaaatcgttagtgtccccaccctaggacactggcatatccgtgacctctctgagtgctctgagaaaaatgagggaggttggtgggcacagtggcagacaggtggctgctggagtctccctcttcccacgggaccctcctgtccctggcaccacaatctcacctcctttctcacttttcagttgcaaggagggatgcatggtttttttagcaaataaaatataagacatctggttaaatttgaatttcagataaataattacaatttttaaatgtaagcttgtcactgtattttatctggtaaccccttgcaaggagcctgcagaccccaagcaaatgtcttcccttaatctagaaaacaccttcacccaggatgggagcgacatgagccatcaggccttttatttgcttttaatatactttggtgtgggcataagtatcttaaataattgaacctgtaattgcaccataaaaacaatgatgctaatacaaataacagccaacaagcatggagcgcgtactctattgttgtagacacacgagccccagaaaaactctgtgcagaggagaaaactgagccacagacatgttagcaacttgctgaattaaagaccttttggtaggtctctgaaacgctcacacaggacaagcaggtttttcctacgtttgcacaaagctctgctgactgtaagtctttctctctggtgtagatctatatacacacatatgtgcatgtgcatcctgcacaaatagtgtgtgtgagagaggaagtaacagagagagagacagacagagagagaaggagaaaaaaatcaccctggacttagctctgggcatcaaagaagtggcttcatcttgacttgctgcctcaactgattgaagcaatcccaataattggtcatgatttttctgcaaggattcagctgcgtatttcttggtgtggggacagaggatgaacccctcaggctttcctctcactatggtgtctctggtgggaacagctggggatgcaaagccattatgatgtcggataggagagaaacctgctgtgccctcagcccttgaggattgcttggtgagaatgcggagccaggtccatcccaggaggaaaaggcccaaactctaggcagcttctcccagggacttcacagacactttttatgtcttgaatacctgcattcccagacccaaacccacagttcccagttcaaacacctggttctagtgccttttccgctgcccagggatgccccaggtgccaccgctcccagtctctccaagtctttacgcaaatataaagaacttctcactggcagggaataattcttacaaggctgtgtggcaaatggaaagtttttttttttcagcaaaacaaagattcttttaacatttgtagaaagtcattcaaggaactgtttctgaaggcactactttggagtttggactgagtgtgggagagtgcggggtgagggtgtgtggacaacagggtgtctttgcctgacatgaaaatttaaaaaacaaagaaataaagggggtacttgagggtgaaagataaactcacaaacaagtcaataaacttccttttcagagttactgagcacacaggtgacttttactgatttatttatttttactggcattatagtttactttattctcctttctaaatagttttcacagaaagaaaatgctgaaaagcattcctttatggttgcgtttttgcttaggaattcttttgatgctaggggtggggagcaaactgaagagagatgtaggttttgtgattttatcattttttatgatgatgcctccaggtagcacatatttatatcctgacacagtcttgttcttacttctgagtacccagttaacctagaggagtcttgagtggactgcagatgaggagagcatgaggggtttgcaatgagccaggcaggtgcacctgagcaggcactgcccctatcagctgatactcatggagaggagactggcctgcaaaccctctgccagtactgtaaaccctacatgtttaggtctggtgtgagttctaaggaatctgataaatgcctgcctttgtcactctggctgactcggatcccatgaagctgatgggttagatgagtctgatcctgagaaacacccccgggtgcaggaaatagtgaaaatcagatacgaagaagccacacctgtgattttaatctttatgaaaatatcatgcttctgaacttcctctttcaaaattcggatgacacacaagtctatcgtacgtcatctttaccactggagggtggcttcacgtgtttataaggaagctgatattgtgaatcccaacctccaccacaacgctcacccttacagacacactattgcaggtctccgagggcctttgggaggccctgcttcctgcgagctgtcccggcaggacagagactcttcccgccgcggccctgccattccaggctgaggctgtgagcagcaccatgacaagctccagccgcagtggctctcaacagtgtgggtctctgaccacccgacgagctggaagtgcagaccgctgacctcccttgagaacctactgggttcttgcagtaggctcctcagcggtgtctaaacacgccactcagatgattctatgcaccatcacattggaaacttttttcattgactgttacttaatgagaagacttccctccgggatggttctgaagcttccttcataggagcaagcctttggcggagagcactgagcagacgtgcagcatctttgctggcttctaccgaaacaccatggatccagacgtggttttgtggtcctgcacgtggaagccagccctgcgtggggtgagcctgggactgtgggcagagaacctcaagcaccgggccggcacccaagtgcagagactgcatcgtcccagcaggaggcgctgcttccaggctccctggacggactccgggagggcggcctttccccccagccccagaggtgggcctgcccttttccgagcgtgggacacagcccaggaaaacgcatggcttgtcctccagacacaggtgctaacagggccgtcagacaagggccagggactcaggcttttaggaatttcagctccagagccaccatgcagtgggaccaggggtctgcgtggacaggaagcaagctgtgtagacgggggtccatgaagtagagacagggttttggggaaggttggggcagggcaaggaggaaaagccacatttacagcaatttctgaagtcttttcattttttccccctgaatcacatccataataggatttgaatttaataaactgctgaaggttcctggccctgagtcccagtgtcctcccagcccccgcccagctgtgggtgtgcatggggagcggtacgagggagggtaaaatgggccccttggacgccgcgtgcagagcagagatgaatggcccgaaaccctcgcgctgctctgcgcccttcgtcatccagtcggggtggttagggactgtcagagaaaaataatttagcggccatggctctaactgatgtgctgcattctggggtcaaatgacttttacaaagtagtagtgctgcctggtttctccatcgtgagagctcagggctgacaacatgaaagaaaaaggcactgcagccagaattcactgacattcttcacatttcacatgagtgggacgcaggaggggggctggggagggtggagggatgtttcctgcttaacagattcaacagaagagtggcaggctcagctgggtgagcaaggtatcccagcgacgggggacacgccccagaccatgggtggtggggcttctcagaggaggtggcaggagacccgagcctgccaaggttgcacctaaggtcacgggcagcattaggagggctctctcccagtctccccacccccccatcccccctcccccaggctgcaggggtgaagtggcttccaggacggtcactggcaagtttaagctacagagagtgtagaaacagggtgaaaaaggaagagagaagggagtaaataagaaggaggtgtaagaaaagaccaagccaggccccagcgcccttgtgaggaagtgcccagggacttatgtggaagccatccttgctgtctgccaccttgtttttacttacattgtgtttttatttgagggcgagtttggacggcaagactgatggagattgtggtctaaatgcctctaacccactccttaaaatgaccaccggatgttccacaagtacttgaaaatgaatgaatggcttcccgagaggcagaaggcaggggtgtgccctaccccacgccggccaagagttcaacaagcattggttgacaagtgaatagtgagcacttgaacccagtcacaattcaagatgagggctctgccatgacgcatgtggtctgtgtcaccctgcagtctccctgagcagtgtctgaggttcgagtgggaccctacattcgtgaagagatttatcatctccccaggcaaaataacagattctgtcctaggtgttgtgatgtaacaatggtagcgatcacagccataacttacaattattgcatacttacgacgagtcccgcactgggctaagtgctttttaactatgtgaaatgtttctttccttgattgatgccaaaatgaataaagataattttctgtatctgctacattagtgatgcccacagataattctgaacatgataagagaaaagataatttgcataaatcagccattgcaagacttggcaggataagattgttttaaaatggtatcagaatagtttctgacagataggaggcaggaaaatagggtctggaggcaggaacataaggccggtgcacactgacttcctagagctgaatcaaatggaaatacttcagcgatgacaggaaatgtcctctccatttacacagggcctacgccgagtaaccaatggaaatctctagagggtatttaaaccccagaaacttcagtaacgggctcttgggcccctgtgctcaggtgctcccaccccgtggagtgtgctttcatttcccagaaatatctgcttttgttgcttcgttctttccttgctgtgtgggttttgtccagttctttgctcaaggcgccaagaacctggacacctccaaccggtaacgcccagacagttgagaacatgtctggagtgagtgaaggtaatcgcaggttagaaggcggacccacagctgcgcaggaaggaaccggaggggtcctgccgggcagagtgaggcccagctccccactctcgctccggcctcctcggcctcccagcgcgattctcccttggaccagggaccccgtctggatcctgccgggctggcggcctctccggctgctcccaggcacagggcgcctccctggtggaaaacttgaccccaattttacccggcacgaccatccgaccctacgcgtggagacccagtcacggacgaaacctggcacgggggacccgtccctccccctgcagacagaggcgccctggccgctccccacccggcctcgctgtctcctcccgggcagccgcattgtcaccctcaaaaccgccggcagcacctgttctcccatcaatcacctcaccaggccgggagacattctttcccctcccgctccacgcggcctctccttctccgagaagcctggacgccactcccaacagggaaaggtcggggtctcccccgcgcccccagcgccgcccgttccccctgcacccgccgcgcccctcacctgcggcattggcgtcctcctggccctgccgggcgcgtggccgggcatctggatgtcgaacagctcctgcagtgcggcctgcgcggcctgaccccgggccagcttcttgctgcgccccgagccctcgaacgtcctgccgtccacgctcacggccatcacgaagctccgcgcgcgccgctcggccggttctgccagacacacgtagcgcagcccggcgcgcaggcggttcagcagcaccacggggttgcgctcgcccggggccgcgggggtggcgggggtcgggcccaccaggtccagcgcgcggcacagcagccgccgtcgcccgtaggccgcggacagaagcgcggcgtccccggggcggcctcccgcgagtccggggcgcggcgccgggggctcgaactcctggaagagcgtgtcggggaaatcggcctggtcggaggtgaagtccgtgccggggcccgggcccccgcccatggccaggtgcgcctggcaggcgttggggaactgcacgaaggacctgagtgccagctccgccgcgcgcatcttggccttcttcttggtggggcctgtgccctcgaacgtgagcccgttcacctccaccgctaccgcgaagaccggggcatgcaccgggcccgtctgcgacactgtccggtactgcaggcccggcctcagctcgtgcagctgcaccagcgcgttcttgggcgccaccgaccacgacagcttcttccagaccagctgcagtttgcacaagtggcccccattcccctcctccagcggccgcttcctcttcgcgccgggcgcgccgccccgggcccggtccccggagggcggtggccgcgcggccaggttgcccacgttgcggttctccttcacctccgcgctgctggtacctggaggggagaacagaccagtcaggagcctgggcgggcgccggcaggtcgatgggcacagcaggcactccctgagggtccccgtcccagcgacctcgccgcccgcgcccccaggtcaggcctgagaaatgactgtggccgccagagagagggagcccctgggagcctatggcccatgcggggaagtagcgtccttggtcccttgctgagggcctgtggctaggagctgtcgtcttctgggctggctcctgttttaagtgaggctgtgtctcacaaacagacaagcgcccctgactttgtacaagttttgggcaatgtcaaaggtcagagaggcctttcccggggtggtgtggtctagtgtcccccttcccacctgctacagggacctccaggcccggtgcccaatgcccccccaatactgagggtcagggggtccggcccccaaactctacttcctcactcacagctagaggcagacaggtggtgtctcctgagaactccctggaggaaaccctaggagctggcccaggtgaggcactgcggccttggggtgagtccctggcctttctcctggagaaggggcacacctattcagtaaatacggttggtcctctgtattcctgagttccccatctagggattcaactaactgtggagagaaagtattcgggaaaaaatggatgaatcactacggaacgtgtacagacatttttcttgttattagtccctaaacaatacagtataacaatgatttgcatagcgtttacactgtattaggcagtatgcgtcatccagagatgatttaaagtacaggcatgcctccttgttcggcttcccaggtatcgtgttattcactaatccaaggtttgtggcaaccctgagttgagcaactctatcagcccactgatcccacaccatgcgctcaccttatgcctctgtgtcacattttggtaatttttttttttttttttttgcgacggaatctcactctgttgcccaggctggagggcagtggcgcgatcttggcccactgcaacctccgcctcccagattcaagcgattcttctgcctcagcctcctgagtagctgggattacaggcacccaccaccacgcctggctaatttttgtatttttttagagatgggatttcaccgtgttggctaggctggtctcgaactcctgacctcaggtgatctgcctgcctccgtctcccaaagtgctgggattacggatgagagccaccgcgcctggccacattttggtaattctcaaaatatttcaaactttcccattattatatctgttatggtgccctctgatgcctgatctttgatgttactatggtgattgtcttggagtgtcatggatcgcacccacttaagacggcaaacttaggaactgttgtgagtgttcccaccgctccacggaccggccgttccctcatctctctccctctgctcaggcctccctgagaagccccaatattgaaattaggccactgaataaccctgcagttgcccctaagtgtttagtgaaaggaagagtcactcctctctcactttaaatcaaatgtagggagaaggcatgatgatggccaagatgggtcaaaatctggtcccttgcaggaacccaggccacttgcttggtttctgcccctgggagtcttaccaccttcatcagactggcaagcactttaaaaagacctgtaatgtcgcagtgttttcaggtaggtaccataggtcggtggtcaggagcacaagcacagctcctttggaaagcattttgggagcttcgggcaagaataaagaaacacacaccttactcagcaattctgccactggagatgcatcctagagaaaccttcatacacagaggcagaactgaacaaaggtgtgcactgcagcatgctttcacaaaactgaaaactttgaaaatgcccaagtttctatggttagaggaatgatgagtcatcagtgaaataatcacactacagaatactatatagcagttgcatgtaatggactatgtctgtatgcttcaatgtagatgaatctcaagaaataggatgccagataataaaattgacttgcaaagtaacccataggataggatattattataagaacaccgacgttctatattcttcatgcagccatgcgtctgtgacaaggctgctgatgcgtgggtaataaagatccagtccagtctcccctggagagtgtaggagggaagtgcaatgaggggctggggggtgacttcacgtgtgacttcagtgctttatttcttttgcagaaaatgctctgaagtccatttagcaaaatcatcatttgccagctggggtgatgaatgcatttgatgatgatttaatttttctggactgaccatcctggaccactgttttctggcaaagctgttccattagggaatctcagccatggatggccccacgacctgctgggtccatactaccctcgctggtgaatgtgcttctggaaggctccatgagggtttactacaaaatactctgagaattatggtagtgagctgtgcccttgccccaccctgaggcttggctcatgcagaacctggactttgctgcttcccattgccccagtcagccctggggagggtattaatgtccgattttctcagtggggaagttcctttactgaggttgcagagtttattagttggtcgcagtgcagttcagtcctaggcatcggatcaccctcgtctgtgttgttgctgtaaaggtgattttatggaaactgattacttccatcattgtcttggcctatgtacagtaacacccttttctgggccctctggaagaggaagatgaagctgagcccacaggctgccccacgtgtgaccggatggtgagctgtcccaggcaagaacacacaggcttcccttcactcattggctttgtccgtggggacaggctcttctgccaggtgtggatgagttttttctcattaagcaagtggaaacttgaggcaatttttacagctaacccacaacttagaaatagaggttgagtgcggctggatgttgacacgtgcatctgctggccatgtggcccgaaagtcaagcaggaatgaggcctggctggcccagccccacgctccccgcccctcagcttatgacatcgttgttggagaataataaaaacatacatttcataggcacaaaagatgcccttgaaaatcaggcacctttgcgaggtatcctgacattggagaatgttcttctcacgttgcgcgctgcctgcccgttcagctcggggtgaaaacatccggctcttggcctcagctatcaccaccacctgggttctcctgccgaaggctctgggctctgctttgaaagtgctctctgtttgctaaaatctctatttctcatttgaattttttgaattgtgaggtggctctgttgttttctctggcaattatgtctaaaaaagtattaggtttggggaggtaattttgttcaaaatgtggatctgagagcttgattagttataggtgcacaacattcatttacagttgatggcggcagaaaccgttaccttctgaggagaaagggctgagtgcaaatgcttttgttaatcattatgcactttgggtatacatatagcactgctctactgttgagtgtgtttcaggccaagggtaagcagatgagattaaccatgggattttccaaattgaacttaaagatggagcaaaaaacccaacaagatcaaccccccaaccccataccagattgcatagagatttgcctggtactctgtaatttcttattgatttctcgcaaggtggggatggacgagactgtcagtgtgattacagtggctggcgttattgcatgacctttgctggatctcagatcagaactcacagcaacgctttgccgctagctgcgctgaatgcctcttcctgactcaatgtcctacgactctcagaattaaagttttccatggtataaaccatgaatgtcagattgtggtataagagcctctttcataataatcaataattgataataagagcatacttcaggggcctgtcctggacacaccagctgggccctctggggggtgatatcacctgattagggtttggaatcctctgcacaggccccgattcccatttccctgacgtgggagcccagcacagaggccacagcccagcggtggcctctgcatggagctgtggggaacgggggcgcaggggacactcgggctctgctccatcgtccaggggtacgtgaccctgggcaagtcactcagtctggccaactgattttttaaggcagaaaatgaagatttaaaaaatatttgccttacaagtttcttacagggacaaacggaggcagcacatcaatgggctgagtgagagtcggccgtgagggaacatgggacgcattttgaaaacacagcagggaaatggtggggcagacacttctcatcctcctctcagccgcatctcgcccaccttgcttctctctgtccgggccctacttctctccctgctcatctttttccctgagcttctccgtgcactttgcaggaattccagggaacctgaaagaagggtttccagggcctcatgtctgcgagtcgcgagctgtggctggggttgcgtctccctccttgagaggagtttttgagggagttttgctccctcagaagggccgagagcagcattagcttttccacacacaacaaagcctcctctctctctctggttggcaaggcaagaattcgttctcacaaaaccttccagaacctactgagtcaggtaacagtgcaggtgcctgaggcatacgaagggaaaaacaggctttgcctctttggtccctcaggcccaagtgggagaagccttgacactatgaccctgtgacagtcctggggccgggctgggtgagggtgggagccgagctcgccctgtggcagtcgtggggccgggctgggtgagggtgggggccgagcttgccctgtggtcctgtggcagtcgtggggctgggctgggtgagggtgggagctggtcctaggggagtggcgctctgggctctgaggctgttggaaaatggaggagctcacgtccaggtgccgcccctggcggcctcttgctgtagtgactgcatgtgaaccactcacagctttaacgccgactttacaaattaactttttttccttccacacggaaggtattaaatgtgttagactcccctccccgacccaggaaattggtctcatttttttctccatataatcaacaggtttctcacactcagtcatcgtatataaaaacctagagataaaacatcaggagaccaggaaaacacctgcctctaagtagaaagctattgatggaaagctattgttgacgcacctgcttggtgggtcttagatccgaattcctgcactcaccagggtctctactcaataggccacaccctgggggtgaggggacctgggggactatcggcctcccctcttcatgctgccctgtggaagttaccccctggattgtgtcccaaacccctcactctttctctgtgcgccccaagtctgggtgttcccgctggccagcagggaagatgatagcggctgttacccacacaaaaggcagtggaaggtgcaggtgatcatttgcttgactgtggtaactacttcactaagtgtaagtgtaacgaaacatcatgatgtacgcctgaaatatacacaataaaatacattttaaaaagtcagcctgacttaggctcacaaagcctgattagcccaccaatggcagctctgccctttttccgagagggtgggcatggccacgcccctcctgagtcatcccctctgtctctgatccctagagcaggcacactgagcttttccctggctcccactttttgtactttgtccctgtcttctctcaggaagctgtctccaaagctcgaggcacagattggtgaatggactcgttgtctctggggcacagaggtggattccagtggctgggtgctggcagtgtgacctggcccatcacgcggttcacaaatggaacctaccacatgggccttgttagatcaatggagacagtgcgtgtaacagttttagcattctctgtcaaatgttgcagacactcagaatgcgtgatttcagcaacacatcaaaaagataattcatcatgatcaagggggttttattctagagatgcaaggatgaatccgcatctacaaatccataaatgtgatttaccacacaaacagaactaaaaacaaaaaacatagggtcatctcgacagatgtataaaaggcatttgataaaatccaacatcccttcatgataaaaactgtcaacaaactaggcattgtagacacatacctcaaaataataaaagccatctatgacaaacccacagccaacgtcacacttaatggggaaaagttgaaagcatttccctaaggactggaacaagatgatgtccactctcactacttctacttaaaatagtactggaagtcctaaccagagaaatcaggcaagagaaagaaataaaagacatccaaattggaaaagaggaagtgaaactatctctgttccctgatgacataaatgtgtgtatacctaggaaaccctaaagactcctctaaaagactcctagacttgataaatggcttcagtaaagtttcaggatacaaaatcaatgtataaaaattagtagcatttctatacatcaataatgtttaagctgagaaacaaatcaagaactcaatcccatttacaatagccacacacacaaaataaaatacctaggaatacatttaaccaaggagatggaagatagctacaaggagagctacaaaacactgatgaaagaaattgtagacacaaaccaatggaaaaccatcccatgctcatggattggaagaatcagtgttgttaaaatgtccacattgcctaaagcagtcggcagattcaatgcaatctctatcaaattccaacattatttttcacagaattagaaaaaacaatcctaaagttcatataaaaccaaaaacagaccctgaatagctaaagcagtcctgagaaaaagaacagatccagatgtatcacattgcctgactttaaattatactacaagtctatagtaagaacaggatggtattggtacgaagatagacacatagacccacggaacagagaacccggaaagaaagtggtccgtctccagccatctggtcctcaacaaagctgacaaaaataaacaatggggaaaggacatcctagtcagtaaatggtgctgggaaattggctatccatatgcagaagaatgaaactggacccctatctctcaccatatacaaaaattaattcgacgatggattaaagacttaaacataggacctgaaactataaaaatcctacaagaaaacctaggaaaaacttctggacattggcctaggcaaaagatttatgatgaaggccccaaaaggaaatgcacaaatccagaaacagacaaagtggacttaattaaactaacaagcttctgcacagcaaaaaataaaataaagtaaaataaaaaagtaaacagacaacctacaaaatgggatgaaatatttgcaaattatgcctctgacaaacggctaatatccggaatctgcatggaattcaaataacttagcaagaaaaaaccaaacaactccacaaaaaattgggcaaagggcatgaacagacatttctcaaaagaaaaaatataagcagccaacaaacatatgataaaatgctcaacgtcacaggggaaatgcaaattaaaatcacactgagatgtcatcttaccccagtcagaatggctattattaaaaagtaaaaaaaaaaaaaaaaaaaaaaatccaacatgtttgtgtggatgcagagaaaaggggatgcttgtgcactgttggtggaaatgtaaactaattccacttctatggaaaacggtacagagatttcttaaggaactaagaatagaaccaccatttgacccagcaattttactgctgggcatctacccaaaggaaaagaaaatcattacataaaaaagacgcctgtacgtgtatgttcacctcagcactattgacaatagcaaagacatgtaaccaacctaaatatccatcaacagtggatgaataaagaaaatgtagtacatatacaccatggaataccatgtatccataaaaaagggtaaaattatgtcctttgcagcaacatgaatggagctggaggccattatcctaaatgaactaactcagaaacagaaaagcaaatactgcatgttctcacttatgagtgggggctaaacgatgggtacacatggacataaagaagaaaacaacagacactgaggacttgagaagggggagggaggaatgggtaagattcgaacaatcagctatcagtacaatgttcactatttgggtaatgggtacactagcagcccaatccccaccagggtgcagtatacccacgggacaaacacgcacatgtatccctaagcctaaaataaaattaaattaaattaaaaaaaagttttgaaatgacctatcaaatgttgcaggccctcagaacacattaattgtgaccatgaaagacactgtaagctgccaacaccttttgagggcatgaagagggaggtgtggggcccatctcacagggtggtgccagggatttgggatcaagaggtttgaagggcctgcattataaaaatgatgtgatttggaaaatgcatttatttgcacttggaacaattcaaatagacagttcaaaatagagtataagaattggtgattcctttagtccactccgaaatttattatcccaaataattattattcttgccggtcataattgcatactcatagtatattagagctgggagtaggtctgcaagaaactcatatgcttacaccagggcagacggggaacacttgctatgttagctgcacgtcaggattcttagaaaggtttagcatctaaccaaggagatgaaagatagctacaaggagagctacaaaacactgagaaaagaaattgagacacaaacaaatggaaaaccatcccatgctcatggaatagaagaatcaatattactaaaatgtccatattgccccaaacactcagcagattcaatgccatccctctgtcaaattgccagttatttttcacagttagaaaaaacaatcctaaagttcatatggaatcaaaacagatcccgacttgacaaagcagtcttgagaaaaagaacagaggaggagagtaccactctctgtctgtctccgtgtctctctctgtctctgtgtctctctcggtctttgtctcactgtgtctctctgtctctacccctgtttctgtctctgacacacacacacacacccacccacacacacacacacgcgcgtcttgttggtaaaggctcctcagagtcactcactcagactggaaactgattcttaccaacccctggagggctccagctggtaaacagtgcctgagtgtgtaacataaccagtgcgtgtacgagtgtgtgcccgagcatgtgcctgtgtgtgcacatgtaattgtgcatgtgtgactgtgtgactgtgtgcatgcgtgtgtgtgtgcattatgtatactttgtgtggatgtgtgtgtgtgcatttgtgtgtacacctacatcagctgggtgggaaatggcaggggaactgagcagaaagcaggatggcatggtggccctgggagacagcacagctcccctgccctcttgccctcactggggctcacaccacacttcttctccctggaaaattcctgatgtggactccatgcacctttcctaatgagaccacgtggactccgcgcacctttcctagtgagaccgcgtggactccgcgcacccttcctagtgaaaccgcgtgggctccgcgcacccttcctagtgaaaccgcgtgggctccgcgcacccttcctagtgaaaccgcgtgggctccgcgcacccttcctagtgaaaccgcgtgggctccgcgcacctttcctagtgaaaccgcgtggactccgtgcacctttcctagtgaaacccgcttccagtgagactccgtgggtggcatcccggccacccacgccctggcatgtcctcctgcctctgcaccccagccaagcacctcattctggagacctcttagaatgaggcatctgtgaactgtggcttctctgaggtctttgtgggcggcaccaggttttcagagagctgcacgtatccttccactgtagaaattagagaaaagcaggcaaataatttggaactattgataaataccacaagccagggtcataggacgatcatgagcaatttgaaaactcagggaggcatctgcatgggaaaatgcaaaatgaaatgatttccatccacttctcccacgggcaccctccagagcctcatacgcacgtgaccttgtttgatacggtgtccggaatgtggtgctaagtctaaagttttaacgcattaaaggacagcatctgggggagaaaggccaacgctttatattgtcatgactgtggtgaaacttttgctttccaagtggaagctgttccggttgtgcaaagccggatggcctaggctgctgtctttcaaaggtggagagcatgtgcgggtggggccaggccgggtgggtctgccctccctctgcccgccgtatgcagcgctgcgcttgctccagagctcaggcatcctctcctctggctcccgccgtccgtcctctgctgggccgtttgcacgcccggcttcccctgtgcggtatcattgggaccgcatgcatcactaatgacgctgcgtgcctgcgggtcagacgggctcccgggagttagtcaggcagcgcgccacgctacattggaagagataatgttgcttctggtgaaggttattctgcggccgagcagccctttccctccatgaagccccacttagggaggggaaggcaggtgcctgggttctccagggcaaggcagagggtctggaagcgacaggaggcaggctggggccgggggtgggaggcagtggctcctggcatttgtggagtggacactggcaggctgggcagctgcagaagggcctccttcaaagactcgtcacgcaggaccccatggggctgggcctgtggtgcatgggactcaggaaggagcaggtgcggctgtcaggaaacctcttttcagcacaactccagggcccagggccgcctttgtgccgggcagccttgggctcagctggtcctcgcagaactgggtcggatcccaacctctgggcggtggtcagcagagaggttacagtggccagatggcagggactcatggctgctcagtgttggaagagaaaactcctcagaattaactgccccagggcagacacgccttacaaacgtggagttgttcggtccactcagcccagaccagcctgtgggtgatgggcttccagatgcggctcccaggcccacttcccgcaggtataggcatggtgtgtgccctgtgagcctgttccccgctctgcacccttagatgaagggcactcagtcccagacaaaagccatgaccctgtgaggttgtgggcatccagcatccacagggaagcacatggtattccccaaaggtgcaatacacgccaggtgggatgagaactgtcctcgtattggagcccttagacacacagactcacagggtgtgaaacacgggagaccggaggaggcagggcaaggtcatgtgtgctcctaccacccacccttgctcctgacatatgtgcgtgcacacatgtgcacagattcacacgccacacacatgcacacacgcacacatgtgcacacacatgcacacacgcacacacacaccacacacatgcacacacacacgtgcacacaccgcacacatgcacacacatgcacatgacacacatgcatgtgaactcccacaccacacacgtgcacataccacacttgccacacatgcacacacgtgcacagacacacaccacacacatgcacacacacacatgtgcacacacacgcacacacacgcacatgacacatatacacgtgaactcacacaccccacacacgtgcacgtaccacacaccacacataccacatgcatgaacacacatcacgacacacacacacacacgcacatctttttctaccttcccgtgcatctggattacaaatggataaggccgcgctggcaatgccacagggatctaggaagggagggctgattcatttgccggtttgtctttgaacaatctatgaaaataaagtaaataaacagcatctacacaaaggggagcaactagtacattggttgaaaatgagactcctcaagcatttcaagagcattttaactaccataaataacttaaagttattgttacctctaagtttctacccattagcatggaggctctgagagttacataatgttcacagcccaaggcagcttggctgccaggacagagcctgaaaggcttccagaaagtccagaaagtcttggcctcatcaggccctctcctctcctcactgcccagtgtgggggttcttatgggagggcagggggaaggagaagctcctacgtggggtgggcacgtccctctctcaggaatctcacgggcagagcagtaactttcccatgtagtcaggtggtttatttctccaggtcttggcctctagttgctacagaaaggcggctgctgcacctctgtaagtttgaaaccattcgctccgcaccccaaatgtcctctggcccttgctgaagcttcatttctttttctcctgagggagaccagctccagccgggatcccagcagctccaggtgtggaagaggaggaaacagtgaacttccccttcccacgtgtttccaggtccacacgtcaggctcagctttggtggggcaggggggtgggtggggggggttgtgtgctcctggggtgtgtgtgtgcgcatgtgcttgtgtgctcctggggtgtgtgtgcgctcctggggtgtgtttgtgtgcacccctggggtgtgtgtgtgtggtgcgtccctggggtgtgtgtgtttgtgtgtgctcctggggtgtgtgtgtgcgcatgtgcttgtgtgctcctggggtgtgtgtgcgctcctggggtgtgtgtgtttgtgtgcacccctgggatgtgtgtgtgcggtgcgtccctggggtgtgtgtgtttgtgtgtgctcctggggtgtgtgtgtgcgcctctggggtgtgtgctcctggggtgtgtgcgtttgtgtgcgcccctggggtgtgtttgtgtgcgcccctggggtgtgtgtgtttgtgtgtgcccctggggtgtgtgtatgtgcgtgtgctcctggggtgtgtgtgcacacatgcacatgcctggtgtgtgctcctggggtgtgtgtgtttgtgctcctggggtgtgtgtgcacatgtgcatgtgcgctcctgggttgtgtgtgcacacatgcacatgcctggtgtatgctcctggggtgtgcatatgtgtgtgtgtgctcctggggtgtgtgtgcgcatgtgtgtgtgcgctcctggggtgtgtgtttgtgtgtgctcctggggtgtgtgtgcacacgtgcacatgtctggtgtgtgcttttcactttctctatcccagatttcagaagtagtgatcaataaatggactcatctggaaattttccagtttgggtcaccagagaacagaagcaacctgtgtcaaagcttagcttgaatctcaagctgtgctagagagggagcacagagtctgggcccagccctctctagtgccggcacaccctcctcctaaccccctccttccacgtctagaagagaaggggtccaaaagagggcattgaccttcgctctggtcctgacactcaaaggctgtgatgctacttttgcagaacaacctccatttccagtatagttaattattatgctgtctgggaagggctgtgtttcccacgctgatggcaaagtacacggctccccttgcagacccctcccactgcctcttgttggtctgaccagcaatcccagggtcacctcgcctcctccccatcccgtgacaacaggcgtgtgctgacctcttcctggttgaaaaaggagccatttgccaggtggtgttaaaatttgaggagctgttcacatggtgtggaatgtctcgtcttctttgttaaatgcctgacaatttgctgtgaaccagaggccagctcctgcagccacacactcctggatcctcacccctgcagtctgctcccgagatgccgctcagatccctttcctaaaccagcctggtgccatcctgaggacactgcttggcccctttccagtttcatgtgccagaaatatttgcacggtgtaggggggctcctacccagccctttccttgttaaatacttgtacaaaccgcgctctaagacaccgtgaccatttttctttctggtctgatggaaaaacaaaggaaggagaggagagaatagtccaagaaaactggttaatttcttggaataatttctcagtcccagagacattactgacactttcctgccctttaggtaaggaagggatgccaggtgaggatgggactgcaggtgcgggtaaggttccaggtgaggataagattccaggttaggatggaactgcaggtgaggatgggactgaagatgagaatgggaccacaggtgaggatgagactgcaggtgtgggtaagactccaggtgcgggtgggaccacaggtgaggatgacactgaaagtgaggatgggaccacaggtgaggatgagactgcaggcaagggtgggactgcaggttacagtaggactccaggtaaggataggacctcagatgaagacaggattgtaggtggagataggattctgggtgaggacaggacctcaaataagaaaaggattccagctgaggacagaattgcaggtgtgggtggggttgcatggaagatggggattctgtggaggaatgagagcagatactgtctctccaggtaagaccaaacagaccctcccagatgaccccaggtatctcaggttttggggactgcaggggacccctgcacaaaggatacaggggcctttgtgtacttcggggaagggaagttgcttactgagggtgtcgtcatcctccgtgtttgtgatgccaggactcaggtgcttgaaaggagcgaggaaggttgacaatatgcttactttatctggaaagaaaagaacaggaaatgcacttttgacatggagttgcggaaaaactcaatgcttttataagttcttattactgaatgttggacaagggaggtggagaggtcactttggtttcagccatttcattctggttcagtcttttattgaatatctgacagcattttatcaaattcctctctccactcaatttaaaactctacgatttccttctttctccttctcttattttggcatcccccttcatcttgcccatgtcccttaaaacttgctatctccagggcgacaaccttgcatctgtttacaaaatcctgggtagggcagagccttctgtcgagatcatttcacagagatgggctaaaacaagtaaaacaatctcacaattaaaagagaatggtgccaataaagccaagactatcttttcctattagtgcagaatttgctttctgggcttgacatgcattaaaaataaaggacctgtcacttagcgggtgtttggcagaagtagaggaggggaggagggagctagcggtgtggggcagagcatgcacagtcctcccggaaacggccaagcgtcctcaacgcggtggctggaattccagggactgcctctgcctgaagcctgtggccaggtaagcaaaggccaagcaggtcctgcctcctgggtccctaccacagtgagtgcagcacagctgtggaaatagatccaaccaggagatgccgctcttcaccaataaagtatgcttttttactcccatggtctcagcaatttatttcatcaatagcgagattaaggaatggtgggtttgaggtatgattgagagaaataaaaatgactaataaagggatccaaaagaaaagctccttaatttggagatttccaccacctaaatgaagccaccgcacttgggagtattggttcacacggcagaactcactgcactgcagaggagacgccaacagagacacagcacagggatcccctggctcccagacatcctccagcccgcacggttcacatgtgccattatgaacctggaccacactgattaagacgccccaggtggaaatgtcagcgttgctcatccaacacggtgcagagcgcgacagaagcatgtcctagcatccctgctaagttccagggcactggctgtggtattggctactttgctaagtgggattcttccctctgttttggaagctgtggatatccgcggacgggatttcccaggaggtcactgagtttacatcaccctgtaacaaggacggctgtccacaggtgccccaccgtggcactgtatacctccttcagtgtgatttctcaagaaaacatgaactgctggtttcatctgcccttggccttcaggcgtccagactcagcctgaaactggctctttttcttttgaggctgagcctgttttctccttagccaagatttccagagtccaggagagttcccattgaaattcattcgggagcctgttaacagctgttgtttccagtagggacgggcaacagagagaacaataaataactcaaatataaaatgcctttaccttctttgttctaccgaacaagaataaaccagggaagggtttgctctcctaaacccttgcagccgaagctaatttactaccagagaatgaaatatcttgcttgaattataatttcattaagggagtccaataatgttacactaagagtgtgaagctcaaatgattcagtctggaggatctcaagatgaaattacatttttaataaagtagggctaccagccaaacactcacaaaaatgcactaaactatttcagactttactttagcaaaattgtaagatatttaaggattgttttagatccatcaaagttgttactttctgatgttgttagatttatcaaataaaaattcaggacatccagttaaaattgagttttagataaacaatagacaattttttcatatatagtcatttctaatattgtgtgggacacacacatatatatttgtgcatatacacacacacacacacacacacatatatacttaaaaaccttattcatggtttgtctgaaattcagtggaaggcaaaggacttcaatagacatttctccaaggaagatgtactaatgtcaataagcacatggaaatgtaatcaacatcactaatcattagggaagtgcaaatccaaaccacaatgaaatacctcctcacacccattaggatgtttattagaaaaacaaagcaaagccagaagataatgtgttggtgaggacatggggaaatgagagccctccgggaatgtaaaatgggggaactggcagttctgcctgctggcgggtcaatgcccaaataatggaaactcaaggagagatctgcatcctcatatcctcggcagcatcgtgcaccagagcccagaggtggaagcaactcaagtgtccttcagtggatgagtggataagtgaaatgcggtacagccaagcaacagattaggcagccttaaaaaaagggaaatcctgccatttgcaaccagtgtgcatgaaactggaggacctcatcctaagtgaaatgtcaggcatagaaagacaaatactagtgcatggtctcactcacacgtggaatctaaaaaagttgaattcaccgaagcagagagcagcatggtgctgccagggtccatggggtgaggggagaaaggagagagtgaggaggtgttggtctagggtacaaacttccagtgataggatgaatgagttttggagtcttaatgtgcagcatggggactctggctaataacatgtattgcccacttgaaatgggataaaagagtggattttaagcatcctcatcccccacaatggtaactatggctggtgacagatgtgttaattaatttttggtgatcgttacccaatgtatatatcaattcatcgcattgtacaccttgaatatattcaacttttatttgtcaaataaacattttaaaattaaaataaatatggaaaaaacaatggcaaaacaaaatcaaatgtaactgggcatcctgtattttctctgacactcctagttatgcctaaccaacttctctttccacgagtgcagtggacttcagatttcatgggacagcttgagcaaccaaactgaagcaaaggaaacagaaggccagcagaattgctaacacttatttattgctaacaagtacacctgaaattccaactatgatctgcaatcaccgtgaaggcacataagctctgggagagaagcaattatttccaagaaagggcagaccgcatctttagagtgttcttagaaaagaggtgaagaattacatttttaatatagaaaaagtacaacagaagttctttggcatcagggcctctctttgtggtttcctcggaactcattgtccatttgggatctgatgtatattctgttagttcaatacgagtggaactctgatattcagctaattcgattttttgcatgtttctcattgtcatcttttggaaatctggttttactcaagcttctgatgaaaaaaggatgccatactttttttttttttttgcctcagttctggaccttcggagtgtgccaggagaagctgcatcacagggctccccacgctaccgccgcctccccaccctctgggtaatgcctagaagaggcggctgggctggccaggtgttactctagaaacgtcaggggtcggctgggcactccccactcctcagctgctcacatcctgggttcttgagctcgggctcccatcatcgaatatggaccagctggaaactgacctgggggacgcagtggcctggggccggccctggtctaagagtcaagagtctttttcaggaaaggtctgatggccgtttttaatgtacgacttgtaagttccaggacacttgctttataaaccttgttactcactgtggaataaatggcatttacctgaagcaattttatgtattttagggggcatctgggtgcacatctggagggcacagcagcccttgcctggaaccacgtgcagccatgaagtgcagttggcatctgcaacactgaggttctgaggttattgtcggtttttcatattacgaccgtttgggagaattactacactgtcagggctgagggaaagagatactcactggaataatttttaggtattttcagatttcctaatcatcttgtttagaaacaaaatgtcctgagttaatagtttacttattgtttcttgttaacatcttggggtgaggattttccttgagtatgattaaaaaaaaaaaagcgatggcttattttccctgaaaggcacatgtggatatgccagcagtttttcatgcaatatcaggaattcatgagtcccctgaattcatcgccttccccagaatgcttgatatgaattatcaggctttaagaacatgtggttgaagtattaggtgttagtgtactttgaaaatcaaaataactgcacatactgaggatacctggttacttggttattagtcacactgcatagtcactgggacacgtcttagctttcttgatgtatttattctgcaaagaatctgagacattgagaagttagcggatgtgcccaggactatctataaggtcctcagcacgtcccaggcttccagcctacagttgccttccacactgagcaaaggctgcttaaggagatcctcattttcctatctttttctgcccgagtaaagtttatccttgtagtggctgctgaattttctggatttttcttccttgcctttgcctttgttaaattttattgaaccttctatgtttcatttatcctatctttaagatcagaacagcatctttgtttctcgggccacaaaaggaagaatagtgcaataaatagtttttaattcaagtatgaaaagcatttaaatttagggtctggttaatattttgtagaaaaatcagatggactctcctctctgcagaagtaatcacatacgatgtgttcataaacaagttactggggttggctaaaagccccagggatagacggtgcagaggaacattccctcattgtgaagaaggagagccagttctctacgcttcccggtccaaggaccgtgactcaacaccattagcagagtggggcacagtgagttttcagttctgtcttaccaaattctttctgatctattgaaaccaaaaagggaaatggtaagtgcattatagcctcctccaaagtgagtctggagaagacaggagtgtgtgaagtgatcttgagcccacatcacagtcctagaaagggcaggaaggaaggctttgctggccgtgaatggacaagcctctggccaggatgagggagttgcagctcaccagctgtctcattgtaaacaacagcaaaactggacaaagtctatgaaacaaccgttttcagagtttggatgccaggcagtgcgtgaccattgttcctgagaaaaggaaagcatgagagtgcaccccacagctccacaacttcccacctggaagctcttttcagcagtagaaaagtggacctggagaagaacacagcagcactgataagttgagaaggcaaaaaccaaagtttgcactgctgagacaactagaatttgagggcagaaggaagctgcttcagagatctggtggggccactgctggatttggttgagactcagccccacatgagaaggagagactcagatttcacagagagcagtggctggggacctgcgagctgaatgaaaattcaaatgatggcacaatgctgaaagtctggcattctgatcaggcggagtcatagatcactgaagagctaggattcagctgggattgtaaaaaggtcatgttttaggactaggaatactctagtcctagattaagaactgccgtgaacatgcgctaacaaagacttaaaacaagctttgaaatcatctagttgatcatttcaactagaaactggtcagtaataaactacccttggtcagtaataatctacctgctagaagaaaactcaaggaacaccgtgaaatccatattctgaacaacatggtatccacaaagcccagcaaataatgatagagtaatagtaatgacattgctagaagtgagaagcagcaggagaatatgaccaatcatcagaaaaaaatatagtcgaagtaaaaagatctaatgatgctgaaattagcagataaggacattaaatagatgttagaaatatttttaagaatttaaaaataaaggggatatgataagtaaatagatggggaatcttggtagagaaatggaaactatataaataaaacaaaaattctcaagctcaaaaacataacatttgaaatgaaaaaatttactggatgggtttcacattggatatgtcactttgcaaaacatatcagtaaatttgaaggcagatcaatagaaacaatcaaaactaagcacagggagaaatagaaaaggtgaaaaaagtgacagactcaacgatctgttggacaatataaagcagtctaacttatgtataattggaattcaagaaaaaaatggaaaaactgttaaggtagaaaatatactttaaataatagtttaaaagttttcaattcttttagacacatcaaatcacagatccaagtatctcaatcaaacttacatagaataaatctgaagaagactgtaccaatcagcacagccagattcctgaaaacaaaagatagggaaagtattttcaaagtagccagagaaacaggacatcttacatacagagcaactgcaatgagaatgacagaatacaaatcaaaaatttgctaaaagactattaactctttaaatacaagataatgacagtgtactgtaatgtttattgtatatttagaaaatatataaaaagagcagcacacaccttgggatggggtaaatataattattctgttgcaagtttcttcctttgatcatgaggtagttggctatgataagttaaacatgcatgctttaatctctagatcagtcactaaaaataatacaaagaggtatagctaaaaagtcaacagagaagataaaatagaatactaaaaaagattgatttgttgaaaaaggcaaagaaagagaaacaaaaaaattgaataaacagaaaaaaattagcaatatggtacacttaaatccaaatatatcagtaattacattaaatgtaaatggactgagtactccaattaaaatgcagagatattcaaattgtatttaaaaaacaaaacttatattttttattgctacaaaaacttacttcaagtataaaaatatagacaggttaaaagtcaaatgactgaaaaagatacatcatgtaaatgcttattttaagaaagatggaatggctatgttaacaatagacacagtagttttcaaaatatgaaatattgccagggattaagaaagacatatcacaatgatcaagtcatcaagataatataatacttgttggtgtttatgcactcaacagagttttaaacaacatgaataaaaaactagcaaaatgaaggagggtagaaacatacataatgctagtttgagattttaacattcctcccctagttactgatagaacaagtagtgagaaaaaggtggtatagaacaaaaaattagaagaactctaacagctaacttgacctaagttacatttatagaacactgtatagagtatttgctgagatggactgtacactacaaaataaaaaaggtctcaataaattttataggtttgagatcataaaagtatattttctggccacaatatagttatgttaaatatatgtaacaaaaagatatatggaaaatctgtatatactcagaaattaagtatcaccattgtaagtgacccaagagttaaaagagaaatcacaggaaaattaaagcctctttattctcagtgataatgaaagtataacataacacaatttgtgaaacatagttaaagcaatgctgagagacatattttagctctaagtttatgcttatattagaaacaaagaaacgtccaacattatctaagcttccactgtcagaagctaaaaaaagagagtacatcaaaccaaagttgttagaggaagaaactactaaaattaatagtaggagtcaaaataggaagtggaaaaaaatagggaaaaaaccctaatgaagcaaaaaaattggctccttgaataggtttgataaatctcaagttagattaatcatgaaaaaggagaaaaaaacttccatgttttctaattagaaataaatgaggggatcttactatagttcctgcagtcattaaataagaatatgggaataatgtaaactattgtatgctagtcagtgaaaaacatatttgcaatgggaacattctttgaaaggcaaaaactgtcaaagttcactgatggagaagcagaaaaccagaagagtgcaatatatattaagtaaatttaattcatagtaaaaacaacctcacatgtaaactaggctcagagagctccctctggtgaactgcaagaaatatttaaagaagaaattataccaattctgtgcaaaattttctagaaaaatggaagggggtggactatcaaaattatttgatgaggccaatgttaatctaaagccaaaaccaatcaatgatgttataagaaaaaaaacctacagacccatggtcctcacgagcagatgagtttttaacaagatattagcaaatcaagttcatccctatataaaaatgttaatgtatcatgaaccagtgtggttcatcctggaatgcaagattggtttacagtttgaaaatcaatcaatgtaattcacaaccttaacataataaagggggaaaaataatagtatcttaaaagatgcagaaaaaacatttgagaaagacatgccaaacctccacactcatatttacaagctattgctaaaataagttaaagataaataaatagaaagatacaccattttcacagaattcaagattcaatattgttgtaatatcaattgtctcctaatttatctatagatacaaaacccattcttcatgaaaattctcaccacacaaaggactagaagaaaatttcctcaaattgatacaggacatatccaaaagttataactagtattatatttaatgacgaaagagtgaatgatttccttgtggtactgggaacaaggcagggatgtctgccttcaccacttctattcaacattggacagaggtcttagttagtgtcataaggccagaaaataaaagtcatagagattggaaaggaagtagaactgactttatcctcatggcatgatcatatatgtagaaattcctaaggaaagatgaaaacaactaccagaaataataagtgaattcagcaaggtcacaggacagaactccaatacacaaaagtctacatgcttctatgtaccagtaatgaaaaagtggaaaattaaattaataaacaatactgtttggacaaaaaggtataaaatacttaggtataatctgaagaaaaaaaaagacatgccaaacctctacactcacatttacaaacaattgctaaaataagtttaaaaagacctcaataaatagaaatgtatgccattttcatagaatctaaggttccatattgttacaatatcaactgtcccctaatttttctatagatatgattcgatctcaatcagtactcttgttgaaattgaaagataattttgaagtttatatggaaatgcaaaagacccagaatagtcgaaacaatattgatactgcagaacaaatacaatgtagtaatggcgtaaggctagataaataccagtggaacaaaaggggaagtctaggaatagaatcaagtctgtatgatcaactgattttcaacaaaggtaccaaagcaagttgatgaagaaagtctttttaataaatagttctaagaaactagacaacatattgaaaaaaatgattctgagccctacctcacatcatatgtgaaaatgatcacaagatggatcacagacctaaatgaaaaagctaaaactataaatttttaagaagaaaattgaggagattactttcatggttttcatttaggcaaggatttcttagctaggagatagaaagcactaactacaaaagaaaaaaatgacaaattagttttcatcaaattggaaaaattcagcttgttgaaatacactgttgattaagctaaaaggaatggatagattgggatgatatatttacaatcaagatgactgttttgtatccagaatataaaaactcttgcaacttaataataaaggataacaaatctccacttataaaaagtgggcaacatacttgaacagaaacttcactgtggaagacactacaaagacatacaaatagccaataagcacttccaaaagaccagcctgggccacatggtaaaaccccatctctacaaaaaatacaaaaattagctgggtgtggtggtgggtacctataatccctgctacttgggaggctaaggttcaagaatcgattgaaccggggaggcagaggttgcagtgagctgagatcgtgccaccgcactccagcctgggtgacaggcagagtgagactctgactcaaaaataaataaataaataaataaataaataaataaataataaataaaaaataaaggctgacggcgctacatgtttacatgtcagtaaccatgtggaaaatcagagctcatcccctggtatagtaacttcaagaaactttggaaaatgtcttggttgttaaacatacacctttcctacgaattaccacctccacttctagatatttaaccaagataaatgaaatgtatatgttcacaaaaagactcacatagggatatttattcaaactattcgtcacagcttaaaatgggagatattccaaatgcccatcaagagaagaatggatacattaattgtggtgcatttatacaatgaattactcttcagtaaaacaaaacaaaatgagtgaaatattaaaattttacattatgatatagatggatttcaaaagcattatgctgagcaaaaaagtctgggcacaaaaaggaatatgcagtgtggttccatttacataaagttccaggaggctttcagcactccgtggagaaagcagagcatgggcatctctgaagggtgcttgtagattgtggggaagaggcggaagtgggcttctgctgctgaaatgaaaagatgctgtatttagatggggcatgtgctacatgtgtgtctgcatttgtcattggactgtaacatgtgcggtttgtacattttgctgtatgtaaattatacttccattattaaaaacaattaaaaaccaaaaatcatgactggacaagaaaataaatgatgtaaagcaagcctcaaagaattgttgaatctataaagaagaaaattgaggatgatagatattaaatgaagatctctgctaggaaagcatatctgcttatgcctctacttatcggactttgggtttccgttttcttttttattccccctattttatagatgtgaaagctcaaatatattaaaaagccttagacattgcaataagaaaaattacagtctcaaagacaaagtccttcagagccaactttggatttgcagatcctctgcatctacataaagtgaagggggagtaaccagtgaggggcaaacaagagctccagaaagctgcaagctgggatcagaactgtgagcctcaggcctgaaggaaataatgtatacagtggtccatttccaagacaacgtgccttaaatcggcttaggtcagcaaactacagaaaaaacaggatatactaggcccttgcttggatagccaacacctgctttttggctcaccccctgcccccttagttgccctcacctgaaccaaagaagtttagtctaagatgaaagtttactagcctgcgaaatagctcattttgtctgttcttttcagcctgcccagctacttaggtcacaagtcaaatacctgaagagcccctgagctgactgggattgcaatgcattgtgggttgcaataaaatgcagtaagacaaccctaaagaaaacacctaaagctcctgcccaacaaccaataggcgatgtctgggaagactgtgacccccccatagtgctcagcctatgagggactgggggagggacctgtgcactaggggataaattgcttgttgaaactgtgctaggtgtgcctgcccatcagacacctgatcttgcaagcccatcattaaaagactcactatcgctgttctccgggtctctaagtccattctttgggtttggacaagtgagtttgtttctcacaggcccaaccacacatgccttggtggtctctgaggcctcagtttacccacgatgatttgagggactgtgaaaagatcaatgtttttggagtccactttgtggattgaaactctgtttcatttacaaacagtttatcaaacaatttttagcaagtatgatgaaaacttaaaaacatcttttggtgcgtgatgttatgtcagttatctggaaacttattcatgtgaaataacacattggctggaagtttcaataaaaatgataataaaatgataactgccaggatgtctaagaattggattttttttttttttttttttttttgtgagacacagtttcactctgtcacccaggctggagtgcagtggtgtgatcttggttcactgcagcctcaacctcctgggctcaagcgatcatcccacctcagcctcctgaatagctggtgcccaccaccatgcctggttaatttttatattttttgtagagatgaggttttgacatgttgcccaagctggtctcaaactcctgagctcaagcaatctgcctgcctcaccctcccaaagtgctgggattacaggtgtgagcccccgtgcctggtcagaatttgatctaatactctacctcctaaaaagcactaaatatttcataggataggctattaaaaatacataaatcgagcactttgagtctgtccttatttcaaaaattgaaagtgaggtttgcacttctgcctttcccttttgtgggccatgtccattccacatcttgcaaagctctgcactcctgaacagttacataaccgggattggggctgacagttggagtccacagaactctcttggtgccctcaggctacaatacttcagcctctgttacaagtttccttctcatgttttccttttgccaaaacacgctctgacagatggcctccctcaggcttgacccactttctccatagctgtatattcgaacagaatacaggtatgtcttcaaatggatgcacttctatctaaacacaaaagcaaatcagtgtggacaggtggaatgccctgagaagcaaggggatgattaacctccacgcaggcaggaggaggagtaacattgcagacgaaaggcaaggagttcgtctcacaggtttttaggaggaacatgggttttacaacgccatctccaagctcccgtcctatgaacaacacagggagctcaggcaacttttaaagagattctgggtctgcactgtgttttgtaaaacacgagaaggtttgattcttttggtgaatgtttcctggcaatttcagagatggattcataggtttggtcctgaaagcgtccagttaaaacggaggtggcctgcggtgtcagccacatgttcactgtcatgggctgaatgatatcctacaagaattcatgctgaagtctaaccccccagtccctcagaatgtgaccgtatttggagagagtttctttaaagaggtaattgtgttcaaaaaaaaacatacaactcctaatttccttctcaaagtccccacatttgtaggaagtagtctctctgtgaaagtggcagtgagcctctggcagtgacaggagctcctagtagctgtgcatgtagaaacatcacttccaactcatagggctcaaagcagggctagcaactagtcgcacagccaaatttgagctattggtggaatgtgtccatttttcatggtttaatttcttcttctctctgttggttaaaatgtttctagtattttttagttttaatttttgtgggtacatagtaggtgcatctatttatgggacacatgagatgttttgatacaggcgtgcaatgcataacaatcatatcatggaaaacgtggtatccatcccctcaagcatttatcctttgtgttacaaataatccgattatactcagttattttaaaatgcacaattacattattattggctctattcatcctgttgtgctatcaaaaactaggtctttttcattcttcccagttattttttgtgggtacgcattagccatcaccaccttccccatctcatggtttaatttctaaggcattttgttctcttaccaggtagctttcctcaaagccagggcactgggacattcctgtgtcaacactgggacctgtgacagggcacggttttcacagcgactatggtactgtgcacagtctcaaagaccacccaggccacgcgttatgcaccacgctccagctaaccttggaaaaagctgaaacgccaacacagacacacaccagattgttctgtgtgcccttccagatgtgagcggtgggcacagatacaggtggtccttcaaatgattgatgggaaaaggtgactccttgcaagaaagtatatttaaattaggaaaatagtctaaaggtgtgtgttcacacttcacaaggagaaactcacagctttccaaaggattagccaaggctcagccaaatttgcaaagttctagacatgagtgcttctcctgggggtggaggctgcagaagttgcctgacatcatcctcgtcctttcagggtggtgtcctccgtgaactctgccttagggtgtaatcattaatagcacttgctccactcactcgtcccaggtttagaagagaaagcgcagagccatcccacgtatgaaagaagctcctttgggaggcaggtggcctgaaggcaaccacactctaatccccaatcagcttctgattccaaggccaaattcctcacgtcctactggaagcttatctgattgttctgtaagatttctgagtccatctactcaaaactggacaagtatgtcctgtgaagatgcagtgtgtccttgttcctctgatccacttaacgccatccacccggggcccagcctcaaggcccgcgggtcacctctgcctacctgttgccctcactgcacctgttaagtgcctcagcttctctagagggtccctcctggtgtttctctgctccacagcctgctcctgctgcttcggttctcatctgggctttgcaataatctcctattcatcatgttcaccaatctatttgttaactggttgccaaagtcatttttcttgagtggatgttgtgcaaaggcccaggaggggagagggagtgacctcgtggaatttcacggaggttcgtgtgaccagtgctggggggtcaaaggtgggtcacgagccacagaggagcaagtcaggcccactgggctccctgcactgcatgaagtcactgacaacctgcctggggcctgaggaacgtcaaagggtctgaagccagggcctgagatgagacttgcattctgcaaagacctggtaggagcgtctaaggggaggagctgcttcccctccctgctaaggaagagggtcaccccatataccaggactcgctgtgcacaggtcattttttcttttcttttcttttcttcctccctcctcctccttcttcttcctctctctctttctttctttcgacaagatcttgctctgtccccaggctggagtgcagtggcacaatcacagctccctgcagcctcgaactcctgggctcagttgatcctgcctcggcctcccaagtagctgggactacagatgcgtgccaccataactggctattgttttatattcactagagctgagggcttgctatattgcctgggacctcggcctcccaaagtgttgggattacagatgtgagccaccgtgcctggccaagattttttattctccaagcctaatctgttctttctgaattcactgctcagagctccggcccgacagctgatgacaccgtcttgaatcgaagcctaatgcacaagtcaggctttaagccccatggtgagtgggtgagccagggaccttggccacctccctcctgtctccaacctgggactctccgacggtcctgggaggagctcgctgaaggcctcagcttcacagaggtcctgacagttccttgataagagaatggcaaggtccttcctgccctcctctaactcctccagccctgatgaccgcagcctcatacttgctgttactgcccagcccagggggcagtgatgggccgccaggcacttctccccagcggggcgtctgctccctgagggcccaggctgcctcctcggcgcctccaggttccagtgcaggggctgtgagactcttctgagtgctggacctccctatagctgttgtcctcatccctgcgacgcagaccatcccggcgtcgcagaccatccctatctgcgtcctgggcagctgcgggaatccaatgagacaaggaccgggagtgcagcagggtggggggctgccctcctgtgatggccaggctcggctcactgtgtctcatagcggctgccttcagcgcccccggcttccccaggccttgctgacgcttgcccttctgaagccagtcatgaccagcactttgctttattttctactgagcttctttgaatctggaagtgcggcatcgtgaaccctcctagcagggtgccctgtcctccgctgaccggactgagccacattgtctgctctgagtccatgtttcttcagcactggtccaaatgcgggccatttctcaccttttctacgcattagacattctagttaactggaaagcgagcaatgatcgcgtaagtaatttgtttagagagcaggtcaaagagttaatagctgagcttgcaagtctaaatctaattatttcctcagcactgagctcctggctggtacacgggatgggttttattattttgagcctcccgactcttctcctcgtgcgactctctccagccttgagagtgctgccggactgaacttcccatccctgtccccaccccctcggtgacccatcgcagctgcacgggtgggcgcccacgcctcggccgacgcagccttcacgcccgtctctggtgagtttgggctatttgaacaaaggatagaaaagcctgtcattcattacttccatcattcatttgttcaacaaaaagttgccaggcacgtgctgtgtcccaggatcgaagaatccggccctgagctcctgtcctgctccatttcctccctgccatccccgcctgcagtgtccctgtgacgcctactaaccgcccgcctctcccctcccgagtgcaggcttcctgggtcaccgtcctcctctcccctcccgagtgcaggcttcctgggtcactgtcctcctctcccctcccgagtgcaggcttcctgggtcaccgtccgtctctcccctcccgagcggaggcttcctgggtcaccgtcctcctctcccctcccgagtgcaggcttcctgggtcactgtcctcctctcccctcccgagtggaggcttcctgggtcaccgtcctcctctcccctcccgagtggaggcttcctgggtcaccatcagcctctcccctcccgagtgcaggcttcctgggtcaccgtccgtctctcccctcccgagtgcaggcttcctgggtcaccgtccgtctctcccctcccgagtggaggcttcctgggtcaccatcagcctctcccctcccgagtggaggcttcctgggtcaccatcagcctctcccctcccgagtggaggcttcctgggtcaccgtccgtctctcccctcccgagcgcaggcttcctgggtcaccatcagcctctcccctcccgagtggaggcttcctgggtcaccgtccgtctctcccctcccgagcgcaggcttcctgggtcaccatcagtctctcccctcccgagtggaggcttcctgggtcaccgtccgtctctcccctcccgagcgcaggcttcctgggtcaccatcagcctctcccctcccgagtgcaggcttcctgggtcaccatcagtctctcccctcccgagtggaggcttcctgggtcaccatcagcctctcccctcccgagtggaggcttcctgggtcaccatcagcctctcccctcccgagtggaggcttcctgggtcaccgtccgtctctcccctcccgagcgcaggcttcctgggtcaccatcagcctctcccctcccgagtggaggcttcctgggtcaccgtcctcctctcccctcccgagtggaggcttcctgggtcaccgtccgtctctcccctcccgagcgcaggcttcctgggtcaccatcagcctctcccctcccgagtggaggcttcctgggtcaccgtccgtctcttccctcccgagcgcaggcttcctgggtcaccatcagcctctcccctcccgagtggaggcttcctgggtcaccgtcctcctctcccctcccgagtggaggcttcctgggtcaccgtccgtctctcccctcccgagtggaggcttcctgggtcaccgtccgtctctcccctcccgagcgcaggcttcctgggtcaccatcagcctctcccctcccgagtggaggcttcctgggtcaccgtcctcctctcccctcccgagtggaggcttcctgggtcaccgtcctcctctcccctcccgagtgcaggcttcctgggtcaccgtccgtctctcccctcccgagtgcaggcttcctgggtcaccgtcctcctctcccctcccgagtgcaggcttcctgggtcaccgtcctcctctcccctcccgagtgcaggcttcctgggtcaccgccctcctctcccctcccgagtgcaggcttcctgggtcaccatcagtctctcccctcccgagtgcaggcttcctgggtcaccgtcctcctctcccgtcccgagtgcaggcttcctgggtcaccatcagtctctcccctcccgagtgcaggcttcctgggtcaccgtccgtctctcccctcccgagtgcaggcttcctggggcagggcttcgcctgcttcctgcaattgtgtccagggcgcaggaagctgcccagcacaggcagtggcactgacacggggtgaaagaccatgagcgctcctcgggacatctggcctttcacctgtgcatggttgggagggagacgggtttcttccttggtcctcccactcgctcctgtttttcagggcccctcctctccctgtggagctccagtgaagacccctctccaggagcccctaaccccagttccagataaaccttctgtttttcctaaaactgtcagaacccagttctggtgcggaggtaagacaactcaaaaacgtgtatttgccgtttctttctttgagaaatctgtaataggctaaggaacaattgatcaatataaataaagttttaacggtggaatttcaggtatcagcatagatggagaagagactttcgtgcctctgaccctcaaattacccagctctcggctctgcgtggattggcgtgcccgtttacctgagaggccaggttcacatttgggaagaagagattttctccctccgcagcagcagcgcagcctgcacgaggttgctgggggaaacagaccgctctgtctttggggtcttgatgggtagagtggtttgccagagaaccaccgaagagccttccagggacttctaagagtgggcacttacttcagccctgggaaatctctcctcagagcctggcacaggttttggtatcagcggggccacgacaaatgttcactgaatgagtaaatgaatgacatggaatgtaggaaacacgaaataaaatgaactgagaagatttgcagggactggttattttgtccatctccaaacacagaggaaacaccctgactccccctggccgcctacaggggccaatggcagtcagtcccctgtgctgaagtgccggctgttttctaagaggctgaaggagggtatttatagttcatgggtaacaaggagaaaccacctctggagatctcctcctctctcagaaatctttgcgatgatatgaagagggatggtgttttgggcccgtgatgggtgacgccaccccagatttgcagatgagacccttttatgggacaggtgggcactggtcaaatgacatttataaagaatctggccaatcatatctttttttttttggctcctggttttcattaccactcagcatttcccacctttccgactgaagctcagtcaattagcagggtctagcagggtccccggcctggtgcctggggtccctctgcctctcagcttcccgggaagtggctaatgagtgctgagatacaagagggggagtgtgacagatgctctgtgggggtcgtcctgctgtgtgatgatcacgccctgagacgcattcgtaaatgtggtctttcctacgttcagggtttttgtaatattatttgaaggatgtaccagcttgtcactgagtgtgccagggaaccactgaccagggaagtttatttgtgctgtgtcactaggactatgagtaataataacaacaataataatgaaacaaagggaagaaaacccagcagggggctgcccttgagagtgccctgagggacacacaggaggccctggtgggaggctgccccaaggaagccttgcattctaggatgtcacagcctgcatctggcctgtgcttgggaggtgccagtgcagccacactttccatttctgtctcttattttggaggttggctttgagggatgaggacaaacgtgaggagcgagaattagcaggttcagatcaggggaaaagcatgaaccgcagatggaatggggtgtgtggtgggcagggttggaggcaccgctgagcgtgggcagagaggggacaggctccagggctctgcctgccacgtggagccagcacctgcagctgtcctgcgtctgtctctcctgcgtgggtcggcagagcagcgtgggctcccccaggccaattccaccgcagggctgagccctgggcctccctgagtccgagtccgggcagcagttttaccataaaaggcgcatttagcaaacacacctcagggcctggactctgtgtcacaacttcctgaagtgcacagagtgagacacatcgtggtgaatcgctggcctctcactgctcccagcaaccagcaaagcaagtcacggcagcacatggagatggattttctgggagaaaggcagccgcagtgctctctactagatgccctgaaaatcantctgcagcccactccagcctggtaaaattagatctaaaactggttaatttagtttcaggagtgttttcccacctgatgccaggcctgaagacaccatgcagtaaagcaccctgagctactgccagcccgtgctcctcctctgggtggggacaacgcagtgctccatggcactgaggggctggtgcccgggacgagatggcactgctcccctccccacctggtcactgagagcctccttttcatgctgttcttctgcgttccacacggtttgtaaaaaggcgtggcatgtggatggttttaatttgcttgagtgggagggcttatggctttggagttggagccctgggacagctgaatgttctagaaagcagctgttttgcagctaaggcctcagcgacggctgagtcagggagggccgggaacgacctcaaggcaggagggaagaaggcctgagaatcatcactgtctccaccggaaccttaaccgctggggcccctgaccacgattggaaaactggaaagagcaagcgcagtatcagagagtcccaggacccctcgccagggccccagcctggcatgaaatgggattacatgcctcccattgtgtgtcccggcagccacaaacaccgtcaggcccagcgtcaccctccccacctcccggatgagaaggagcctccggagcagctgagggacccactgtggaggcagccgggtgggggacggcccggtgtgtgtggtctggtcgtgactttcccacaaggcatcacccatgggaaggaggcgtgatgatggtaagcagcacagagccctgcggggaccagggttttggaacaccccggccttcggtcatgctgcgggaagcctgggtcctctccctgtcagagaagacagctgggttctggggtttcacagcacacgggtacccccggttccaggactgaccatggagggcaggtgccagcgctgttcggggcctccggtgatggtcccagctcccttcccacaaaggccaggtgcagccttggaatcctctgacacttggatccccatggattcaatgggagctcgcatgctgtgaagaccgcggtgcattttaaacggcaccagcaaggaggctacactgtgtatcccgtgtccccatttctaccgaagagcggcggcttcacggcggtttgggagtggggtccaggctctgttctgcagagtccctgtttttctgtgagcctcacgctctctagaggagaatgagccactgagcaagcagtttcttgcttgtctttagaaaactgcagcgaggcctggggagcggttcccaaagtgtgttctgccaaacacaaacaggtgctagtgcccagagcatttccacgagcgtgtacttgtggagggctgagttctacagaattaagcagatttctttatggaagggcttcccggggcttgtaatgcacattgtgctgatacaatttgaaaatctccaaaatggagtaaacacacagcctctctcatgaccttggaactcgattttcatgagcatctcacggaacttctgttccacgagacagactggagaagtgctgacatctggggtgtcatgaggcctggctaatgtcttgggaactgccctgcagacatttcctaagtgaagcagcagacagacctcatttagcctgtgctgagccccaggatgaggggtagggaaggaaggctgtctcattctgctctggtccaaagtcagtgtttacgcgtgcgcgcgccggtctggccaggggtagggcgccttctaaaatctacttctgagcgatttgctcatcaaccgctattctgcacacacacgtggggagcctgccacgtgcccactctgctttgcctggtggggtcgggggagaatagaacagagggagtttcactgagaaaaaatgctgtgtggaattggtgcgtggttagcataaaggaagccacttagctcacacaggcctggaaatgcgggctggtgcagtatgtcatttacatcaaactgtgaattctcaaatatgtgaatcaatcaaagacggctgatggaggggctcagccaatggcgcacactgtcatcgagtcggaggcggccccacttcagtggagagtcatcctgccttcctcgccatcagctcccatctccttctggtcagaggaagcctcctccctggggccacccctcctgccccgcagcttcctgagtggatgaggctgacccctcagctccaacgggggctctgattaacctgatcagcataaacctactctcctggcaaaaagggactccacaatttgcagtgtccagtgtaaaacagaaatgttcgaaaatcactaagaatttcaagatggcgccagcagagcatgaagctgaggccgggaccttccaagtggaactgggccggctcctgccccacgcccagatgccaccctcctccctggtgtttgttccgtgaggggcacaggactcagctcagggcggcggaagtccgtcttcctgctggggcaggtgcgctcgtgcgcctggagctctgctgggtcctgcaggcaccgtgtgcggctctcgtggaagcagccggaggtggggatggagaaaggccggctgctgcctccactggaccctgaccccagccgctgctcaactcgttttttcttttctgagccagccgctgctcaacttttcagttccaagagccaagattgtgccttctaacacttgcaaccaaagaggtcctgattcgtacaacccttgtgaccaaatatctcaagcgtcttctctgggcttggagtcccccatgtgtaaaggggcaatcacgatgtctctttcagtcattgcgggggccctatctgggtcgtcactcacaccccgatgcaggagcaaggctaagcttggtcctggtcaggtgtggactgtgctccttgaaattatatatacgttttttaagggcttttgctacttttgtcagtgagagccattctcatttattcctgccttattcatgccagaatgaaccaacttaggcagcagctctgggtgagctaacggggaagccacttcgacaagctcagagcttgcactccacgtgaggggcccggcagctgcccactctgagggagggcaccgtggccccgggcgtagctgatctgcagaccccctagctgtcattctcagagctgcagcctgggacccactcggcctgcagcaaggacaagttcctctgtaacccacaggctttctcatgcaatgcagtattggaggcacgtccctcccagtctcctgttgcccctaaatctgctttcattcatcattgtagtgctcctacagtccccacgtcctagcctcccctgctcctgcctccccgattggaggcagttagagcacacctgtgtcatctgggtgtgtctgcagggcactgtcctgtgaatatcaaccaggccagtagttgtggggagcgacattgcaccccagggtcaccagccaccccccatccactctcagcaagccagggtcaggggcttcctgtggtgcaggggcttctgtgtccccacagctggaaagctctaggccaacaaagatgaaacagctcccagcgcagggcccctgccacctaggtgctttcctaaagatgagctctagaggccaagctgcttacttagttaaaacaagcgttttggctcagaaggagcaggagaagctgctgccaggagctctatgcttggccatgagagcaggacacagggaagggcatggaacggctcacgggggacctcgggagatgcccaggctggtctcgcaggccctaccactggggacctgatggggctaagcatctccccttggcaggtgctgagatgcccctcagtgcccagcacaaataattctgcagagatgctgcccatttgccggctgccatccagcagacgccagggagacgctgcgtggtgatgagtgcgcaagaaccagcgtgggctccactcctcccgcctgtgccctgaaaaaagtgtgtcattgtgtcacttgattttctcagtgacaaccatgtggggctctgcaggtagaaaagtgaccacttgtgtcaggcactgagctgagctgaatccaaattcagcaaaacctctcctctctggtgcctggcgagtctcttaaagctgctcagagacctgtaagctcgccggcttcggggcaagttccttccgtttgaccggccaacagtgacattcgtggacccaaaggaccctggacagacccctgagggaaagtgatgggcaattgttttgaactctccaaaagggagctggaacagaatatattaggagcaactttcccatcccagcgagacttgggtgaattccccgggagctcacgctttctacattggtccttttcgttagattgtttaaggacacgcagcttgttaaagcagcaggaccctgtgtccctttatgtgcaaattaaatctcaggtcgatgcctcctacatacaattcccggcgcctgcgtggaggatcgttgcgtcttcagaaactgctcccagctccgagggctcccagagcctgtggggtcatgcgggggcccagctgacaaaccacagaggtaacggggcagaggtaacgctgcccaggccccattatgcatgttgatcctgtgccagatgcagtaagaggctcagtgctaaggagaattcacatttaccacaccttgactgtgttccaaaaactcatgaagcattcattgatttagacatgttccctcaaccactgctcgtggggtcttctgagctacctacaattactctccttccaatcttgagcttcaatttgctgaaactcaggctggctctagcgcctccacaaaatgagagatctccagaaataagggttcaagattcaatgtggtcaggagttcgggaccagcctggccaacgtggcaaaaccctgtctctactaaaaatacaaaaattagccagaggtgatggtaggggcctgtaatcccagctactcaggaggctgaggcaggagaaacacttgaacctgggaggcagagaggttgcagtgagcagagatcgcaccactgcactccagcctggaagagtgtgagattcagtctcaaaaaaaaaaaaaaaaaaaaaaaatttaagatgtttcttgggaaatgtaccagaatccacccacatctttacaatgtatgttgaagcctctaagaagctgtgcaccaagatacacccatttattaaaccccctagatacacctgtttattaaacccttcgccaagatgcacccatttattaaatccttctccaagatacacctgtttattaaaccttccgccaagatacacccatttatgaaacccttcgccatgatgcacctgtttattaaacccttcccctagatacacccgtttattaaacccttcgccaagatacacctgtttattaaacccttctccaaggtacacccatttcttaaatccttcccctggatacacccatttattaaacccttcgccaagatacacccatttattaaaccatttgcctagatacacctgtttattacacccttcacctgtagacttgggctatgtgttattctttttaaaatctccagccatggtggaggtgtggattttcactgcgatgagcttgctgaaggatctgtggattgcaatgtcaccctggccctcacccagctgctctccttgcaggtctggttagcccagggcctgcttccttctgtgtgtgggccctccccaggggctcaggcagggagctgaaggacacacctcactctcaggacacttgctgtctgtgatcaccttgccaaggtacctgctttccatccagctctaaagccgtgtgggctcggtacccgggaaggagagagtggcctgggggacctcgtggaaggctggaggggtcactgaagcccacagaggatcacctcctaaagtgtctcctttcttcttcatctctgtggcttccctacctggggaccactggtcgctagaaataaacttggccttgactttccctcctatgggttgatgggtctttcaaactttggtggaactcccagacaatttaattttgggctgtgttggctagggatgttcccttttcccaggttgtctgaaataaagaaggctttggcgggggagccctggcaccccttgtgactgctgtgaaggtgagtgccagggtggatctggggctgcccacgggttcgatgacaccaacgccctttcccccattgtcaaccccctggccctgcagttggggccctgattcctgcacgtcccaggactggacgaggattgccggctttcctacttcacagatgatgaatggggggagtggccacagcttgcaggaaaagaggaggagcttatgcccccctcgccagaagcagcccatccccatcctccccagaagcagccttccttgggatggccagggacgctggtgatctgggccctgggggatgcgtctcctcctttggctgtgcggctgcataaagcaggcatccataaagcccacttatttttacgaccttgcattaaattaaatgtgttattttatgcaggtgcttacaaagtccactgagtagcctctgatggctccctggttccctgacacagtggcaggactggcacagaccgagcggaccccatactgatttgctgttctcgggacagcacaggaacagccgggcagcaccactgactcctgggaagcaggacgatgacctgcagtcacctgcagctcctgtgctgtcctctgtcttctacaagtgccattggaaggggtcccgggtccgacgtctccggcgtccttctgagccactgctactcctgaagagggtacaacggccggggtggggtctctggcttaacccctggcggtggtcccattggtgacccactggcctttttctctgcagggctaggctgcccttaaaaaatggtttcaggttgagagagactcagaggcttggggaagttgacggtagggggcagggagtcattgcttcctggggcctcagcctgcattctgttggattatgcctcagcccaggagtcccggctgcccttcctcggggcatagtcctagcccagcactggcagagacgatcttcctggggcttctgagaattcaagatcctggcatcagatgagtgacggtgttctgagagagctcaacctgcttcccaaggtggtgccctcccccacctccaggatggaagattctcccgagcatgtcctgggggttgctctcgcccggcctccatccccaggccctccttcccctctgcatgactgttctgtggggggaactgggcagacagacccaaagcctcccagcagaagagagaagtgaggaggctggaggccaatgctttctttgactctaaaatgaattatctcagtattatagaaaatataaaaatatacaataatatttaaaaaggaaattgcattgtcacacaccccaccttccaagggctcacactgttaattattttgcagaatattttatactgtcttagcttgagaggcaagatattagacgaatagaaattggatttaatttgtaaatatgggtgcatgcatccttcttaatgaagctgagatcatgctttacatggtttggcaatcccctttcccatttaatattacattgtgaacatttttcattatctaaaatattctttaaaacacgagttaaaatgtctacataacacattccaatgaaaatatatcccacagcatggtcgaccattcccagattgctggatatacagggagcatcagtgtttttagatattgtgtagatacgtgctcacatgtgatatgcatattattaaggatgctgcactgaacatctttacacatgagtcttgaaccacatctatgatgatctttcagttcacactcttagaaatgcaatagctgagcgaaagggagtcaagaatgtcagggctctcgatttccaaaatcaaattagttttacagtcacaccgagtcccagggccacccgtccagcatgaatatgcccatctcactcaacccttgccagccgtgagtgcaattttaaaagcttgctgcccgtcggaaaccagaaagtcaccctatggctttgacctgtccttgttggtaaccagggaggctcggctgttgtgtgtcttggtgagcctgtgtgaatcctttgttcactgggctctggatttcacttgcctcccagcctctgtggactgagagagaccacggccacacactggtagctgggaattgtgtctgcaccagcacacagggagtggcctgggtcttgctctgtctgcctgggacccaacgcctgctgcaggctcagaggatgagggtggccgcggctcctcacccactgtggctgcagctgggctggccgggttgtgttccagagctgctggctccgtggtggtggcgtcagtgattgcagaggaggctgggccggctgtgctgctctctggggagacctaatgagctcctgctcactcctcaggctgatgcccatgtctcagtctaccctggacccttggacatgctctgttcacaccacatacccctgaagcacgcttggcccacggagcccccgcatccagcccggggcaggtatctctgccttcctcgacccgccctgcctgacagcgggctcccaccttcgtcgccccgccctgcctgacagcgggctcccaccttcgtcgccccgccctgcctgacggcgggctcccacttcgtcagtgcattctgcaaacttgacttgacctgcagccaaacagagaatttttctcttttcagatgtttcatctctgtggccacctgaaccccatctgcgtggggcgtgtggcttggccatcgctgtggcaacggattctcagtggtgctgaggcctggtcgtggtcatggtgctaaggcctggccgtggtcatggggaaggattctcagtggtgccgaggcctggccgtggtcatgaggaaggattctcagtggtgccgaggcctggccgtggtcatagggaaggattctcagtgtgccgaggcctggctgtggtcatagggaatgattgtcagtggtgccgaggcctggctgtggtcatggtgccgaggcctggccacggtcatggggaaggattctcagtggtgctgaggcgtggctgtggtcatgaggaaggattctcagtggtgccgaggcctggtcgtggtcatagggaatgactgacagtggtgctgaggcctggccgtggtcatagggaaggattctcagtggtgctgaggcctggccgtggtcacagggaatgatcctcattggtgctgaggcctggctgtggtcatagggaaggattctcagtggtgccgaggcctggctgtggtcatagggaaggattctcagtggtgccgaggcctggctgtggtcatagggaaggattctcagtggtgctgaggcctggctgtggtcatagggaaggattctcagtggtgccgaggcctggctgtggtcatagggaaggattctcagtggtgctgaggcctggctgtggtcatggtgctgaggcctggccgtggtcatagggaatgattgtcagtggtgccaaggcctggctgtggtcatggtgccgaggcctggtcgtggtcatggggaaggattcccagtggtgccggggcctggccgtggtcatggggaaggattgtcagtggtgccgaggcctggccgtggtcatggggaaggattctcagtggtgctgaggcctggccgtggtcatagggaaggattgtcagtggtgctgaggcctggctgtggtcatggggaaggattctcctcgctgctgccacgagcacagtatcagggatggaaaggtttgggccagaggacttctcaggctgagataatgtaatctcatttcctgagagcaaaataacaaaacaaggagtgatgtattcccttctccaggcgggcagacaacagagatgtcaattaaatctaaaggcctgctcctattcagcagaaaatggctgctgctctagaaatattacgacgttaaaaggagatcactggagtctacataactgttgatggtgtagcatctgctccaactgcctctcctcggtgtctgccacagcggctgcggtggttttcctgtttgaagaccccctgtcctccttcactttcagggtcagccagtctgtgctttgattcaccacggggatgagcaggaatcgtcggtgcaattttacctgcgtaaacaagcgaaccttcttccactgagcttctgccttgagacgtctgtgagtgccgcctgatcacttggtgagcagctgtttcagctgcccggatggagggcagtccagtcagttacggcctctccctctcccgagctgcgccctgtcctcctggaggcgaagggctgagtctcagatcccggactttggtgcagagcaggaagacctgtccttggtctgctccatgctgtgctggtgtctgcgctcctccctcagggcgcctgcagggaaactgcatcctgctctcctctctgcagcctttgggaccagggcacggccatccagacacggccttagcttccttgtctctcctgggccaggtgggcaggtgagatgcctccccagcctccgtgggcctagagaatctcaggggcctggttcaggccttctgcacctgtctgctccaggctgcatggtggctgaggcacaggtgcgtccgtgaggctgcggggcaaccctggcttcgggggaacacagtgctgctccttcaagtgcaccggaggctccgtcgttagcccacccgtccccaccagcccagggcgggaccagcccacagcaccacgtcctctccaggccaccagtgggaggttcaggagaaaccagggcttccagaagcaatgttctcctaactcttacccaagttactgctggacccaagattctgtgaacccaaagcgggaatttgaagctttttcctcctcaggtgactttctgactgtatccctgggccaggttagcttcactaaagcgacaggcaccacagatgtggtcctgggtgggtggtggggacgggcggtccgtgctgagtggacacgttgcagcaacaccacagagaccccacagtgtgtcgggtgtgagctccgccggcaagaagcggatcgaaccatccgtgcaaggccactgtaggtgcttcctgaaacgccatttacgaaggtcgtagacgcaagtgcctgacctacagcaagtgcccctcagcgcttgataaatacacacagttctgcagcaaaagctattttgtttctctgcattttcaaccaaaatttgaaagacattgctttcagctagcagtatagatttctatacataaagacctgaaaactgctatttaaaacagcctttactcagagtggacttagaaacgacgcatcaggctgagaggagcagagaggcctgatgtgttcattcccttcttgccccggtcaagttatcaggaatttgaggagagtgcttgtcttccgagaaattctcagacttcagggcatgcgttggggaaggatgtggtcaagatgtctgtgccttgtcaagggcccttttctccgctgagctgaggctcgggacgatgctggacgggttcggagcgtgctgcatcctgcgagcccggagacctcggggctggttagaggatggctcagttcccaggaaaccctcgggtctttaaaaggaagtcgcaaaccctgttaaagagctggacttcttttgtctgtttactgtatcgccttgaagtctttactgaacagttgattaaaagatgtgttttttttttgaacaaataatttaaaaaatttataaatccatgtttaaatgaaacctgggctttagctatgtgaggttgtgactttattattattattatttttgcttttaaaatagttctctattttattttaaagcaattatatccatacattcaaaaaagtccaaaacagcagaaaatatttcctttgagccaacgcataaagcacaaaataatcctcatatctgccagaggatgggccggaccgcgtttcaggtaatcaactcaggagcaactgaaggcttccgagggtaatggaccacgtaatgagtcaatttgtggttgccaggtgcatccctgctcagacctgggcggggcaggtgggtgtgggggcacggctttcggggctcatcctcccgcaccacctgtgggaagctacgttgcttctctacgtctcaattttctcctctttactataaaaatagcagctacctcatagaattgtcttgaatatcaaataaggaaatccacccgcagtgtttttgtgactttaacgtaggttccttttccttggttcatttccctgctggtccccagccgcccaccctaatggagaggggtcttgcccactgcctcagggctggcgggagggtggatgggccctcgggctgtgggctccatggggatttgggcatggctgcttctcagcagaggagccacaggagcttggcagagcccagccatgcatactctagaatggtctagaacggtctgcaggcaggagacgggtgttagaatccacccaggtggctgacagcctaggaaccacttgagcagttgttgtatggtgagggcgcagggcccagccagggcagcaggggtcccagtgagaacatgagtgggagatggtgcaggaagggggtccccagccaatgtcccagccccaatcccgacactgacacagcactggggaagggggtgctctgtggttagaaacggcgtcgggtctcgcagaatggaggcagagttccagagcaggaaagtctatttcatcatgcccaagctctcggtcttgaattcacacaaaaaacatgtgggtcctaacagtgacccagccaatgtcagcaatggcttgtgtaactggaataccataaattacagctgaagtgcacacagcctgtgtcgtgcacctgctcgggtctaaccatcttatgaaagggtcctcctatcggccctgttttgcagagaagaaacctggacacaggaagcgcagccgtgaaccctagggcagggaagccaagattctcactcaggccctgcccctggggccgggccttctgttctgcccagcgacctctcagcctcaccttgagaatcttacagactgagcgctgatgatgctcccgggcacaatgacaaattcatcgttttaattttttggtcaaaacccaaataatctttagtaaaaaccgatttgtaaattatgcatccattctgccatgatggatagaaaagttttgcgatacccagtgaacactggggatgagttcagttaagcaggtaaagaaatccttgtcttgcaattgcaggtctcacggtgatgtcctctcagtgaagcccaaaaaacaatgtgtgctcgctgggtgccagacccacatcaggggctctattcgttcttcagacgctgttcaggtcccactccctggaagcctccctgatactcctttcctcaccagctcggctcagggggctgccctgcacagccatggcctccagccagttatcctcactgtcctggaattgctcaacctacccccaacccaggcttcgtttccttgatggggggaatacagtaagcacttagctgatgggcagattattgggaaaagctgagtgtcgggagaagctgaggcagtgcttgcatgtctgacataatgtaaaagagtcttagaacatgtctggtggccagggtctaaaaccccttgtggtctttggaacaccaagctctgtgctaaagggtggaaggctaccctgacgtaccgtaatctaagcccagggcataaaatccctcgtggcttggatagaatccagggctcgtggctctggaatgtgtctagacttgctgactccttgctccttgctctcccaggatcgattatatcttgagtgaaaagaacctgctctccattatctcaggtagcagagcaaatgctaaactgtcacagctgtaaatcacgtgcttaatgcaacatgccctttcaacctccacattctcatcacctgtttctttgttggattaccaataaatagcatgtgctcccagagcttggggcctttgcagcctccatgatcacgatggcccctggtcccacctttacttctcaaactgtctttttctcaatcctttgactccactggactttgtcacccccatgacctggtgttgggtctgatcaccccaacacagatggacagaaggatggatagagagacagctggctaggtggatgatgggggctggatgagtggctcatggatggttagatagatggataaaggaatggtgaatgaatggatagataggtggatggatggatggtggatgggtgggtggctatatggtgaatggataggatgatagaaggtggatggatggatggatggatggatagatggatgatagatggatggatggattggggaatgtttgggtggatcatgggtgggtggatggatggtggaccaatggatggatggtgaatggatgggcagagggatgatgggtagatgggtggatgtatggtggatggatataaggatgggtatatgtatagatgggtgggtgaacagatggtggatggatgggtggatgggtggatggatgggaagatagatgggtacaagggtacatgagtggttagatgctggatggctgggtgggtatatgacgatagaatgggcagataaatggtgaaatggatggatggatggatggtgggatggatgggtggatcatggatagatgggtggatataagaaagggtatatggagagatgcatagatgagtggatgaatagatggtggatgaatggatgacagatgagttgatgagtggatggatgaatggatgattgatacatgagttggccagataaacacgacacctcttccgcatggtaagaaatatttgggaatagggtgactctctctaattaagacttcaattacttttttgtttgagtatgtgtcatgaaatgataatttgattggctatttcttagtcatttcatcaagtcaattctatgcaaataagaaaactgccataatgaagcagattagctatttattaaaattaaaaataatttaatttacattaaggctaaaactaaattagaaaagttatttgtttgattctattgatcatagagtcaaaataaaattatcatcttatgtgaaaaattatcactttctcaattgccacctcttccatgcagccctatttattgcccctaaagcagtagtgtctctcttctctgagcattgatggaactcctagggtagtcatattatagagcctggatatgaggctgattctaccactcaccagccgtgtgatcacagcctactgggtgaatatctctagaccactccataaatgggaaataacaataggaccaaactcaagacccgccatggggcttaacaagcagtacacatgacatcactgtgccatccgtgaagatctaagtagacattacttcttgtgattgcctgtcttatttccctcctgcaggttcttagatggactggtctgtgaatcacatgaacatatgcggttcatattcataaacacttattcacacacacacagatatgtacacacatgtacatttgcatgtaagacaggatttggcaaatagaagatatttttgaataaatgaattattgggcaactcatgctgccaaaagttgagagatgaaactaaatgaaggcccaactggggtgagtgtgcctgtgggtgtttgttaaggggacgccaatcattctattgcacttcagttatagctggttcctcctctaacctactctggggtccaaagtcagcacaggaggcccagaggagtgagcgcctggccattggcaggcccctgtgggtctctctccctctgttgattcacagcctccctgtggatgggccgtggggagagctagagcaggtaactggctgggatccaggaaaggcccttgtgaggctgcacaggcaggggccctggagtttctcacccaggctgccctgatgcacacaggtccgtaccatgcacctggctccatcaccacccttgtggggtctgggatgatggcagtcaaccaggtgctccactccagagaatggggcccatgaactcactcagtctccatgagagccagatccctgccagtaagtcacgtggtgaaaccccattaggtcagccaaccttttcacattggcagcgcccagcttgctgatgtgggagagagaaggtgtcggcctggggcatgaccatccacagctgagaagggaggtgggtgcagcacgggtccccctgaaacattccatgtggagacatcagaccccccggcttaggagttgttactgcaggagtgtttgagaaactgtgtggatggtggcctgcagtgtagaccagatagtcaggaagcatagatcagatggccagaaagtgtgggatataatagatgggcaggaagtatagaccagatggccaggaagtgtagatcagatggtgtggaagtatagaccagatggccaggaagtgttgactagatgggcaggaagtgtagattaagacagtcaagaagtgtagaccaagacagtcaagaagtgtagaccaagacagtcaagaagtatagactagatggtcaggatatgcaaactagataggaagtgcagaacagacagtcagaaagtatagaacagtcggtcaggaagtatagactagatggtcaggaagtcggtcagggtagatgaccagggagtgcagcccagagggtcgggaagagatctgatgagcgatttctaaggcactctgctaattgccctgcattaattatcttactgactcaaaagaaggatgaagggttgtggaaggatggattttattatcattcctattttacacgtgaacgaacacagtggagtaagtgatattcctaaaatcacatcaaaacaggcaggtgtggagtttgcaccgtttgcctgacacatggacaggagtctgtgctctcttttgtctgggttctgtattggtggctgggtggtttttgcctccccactcttcactcctgtgctatgggccggcgttgcacctcctggggtgggcctcactcctctggactcagcgccctgcctggcctgggctctgcgtgcttcttagggtgtgccatggctgcccctccagggctcacagtagatgcctgcatggcaagtggcagccatgtgcgttgaggccacgcgctgtgggccccaaggcacctcaaagtttaggcaggaagagcagacgccagggtgcatggggaaaatggcggacagagatctgcatatttgtttacagatcacaatgtttagaagttttaaagaataagccccttgcagtacatttaaaagccgatgaaggtcactccacatcctttgctgagatgtctggggagacttgactttggagcagacggcccaggcaaggaggttcacaattgcacctcctctgtcggtggagggacgtttccgtaaaccaaagggagtcgcccatctaggatcaacttcatcgtgttagttatggtgttttgttaaagtgtccacagaaaccaagcagcctagtcctggtgtggggaagtgtctccttagaatttcaagtcggctatgagcacccctggagttcccgggaaagacggtgggctcagggtcaggcctcgagctttaagatgcagcggggacctgccctgtggctttgctctgtcccgggcagtcccatctcctttctccagggctgctctggcagatcccctgccgagacgccacgggggagccttgttgtatgtgggttctggctagaggcagacgaggcccaaggtaccaaggagaagctctgatactcaaatgtcacttaactaatttccttccacgcaccaacaaaataattggaatggcattgacaaggggaaaaacagcccgcagtaaaaagcagttgtccgaagcttctggtgtcttgaggaaattatttccgctattatctttcacacagggctctagactggccagagtagtccgtattattatgtgactatccagactatttcctcctcagtgccctagctagttttgggccgagcaacactgatacaatagtgattttaaactcagtgagcattccaaagttcagcaaatacatcaagcctttcaaagtttctgcaggataactgagaaaaaaaaaaatctatgtcttgatttttgtcagttgtcttggaaaatttcccttttctgttttgtgcgtgctgtcggaaaccagccaagtgtgtcctgcgcccctttggtatgtaggctgcatggtcgaggaaagaaaagggttcacttggaaccctggatcttggttgcatagtgtggctaagaaaagggatgtttagacaacactggttttcagaaaaatgaaactaaagcaggagcctaaatatacacaaaaatgtacagtgatgtgtcttttttttctttttgagacagagttttgttcttgttgcccaggctggagcacaatggcatgatcttggctcactgcaacctccacctcccaggttcaagtgattctcctgcctcagcctcccaagtagctgggattacaggcacccgccaccacgcccgtctaatttttgtatttttttagtagagatggggtttcaccatgttgatcaggctggtctcgaactcctgacctcattttattgatcattttatctttttggtgtctaagaatctactcccaatttaatatataattttagcttagaatttaatgtatggacagtggaaacttactatcaaacactttaaaaaaatccagcagaatccatatgagaagtttatcttggctcatgcatatgctcccctatgtaaaccgagttatagcaaaaccacgggccactttatggagggcacagcctcactgggcggaaccggtacccagagggacggtaagcccagatggttggtgctgcagtaaattaagcctgatatagagatgtttgtgggttttattaaagtctcatgatgtctctaagcagttcttgttatataacagaatgaattatatcgtccaaggttattgctcagataacctactggaaatgatagttttcctccttcatcacatgaatctaaatgttaactaagcgcttgttagcttttcacatcacatcggagggattcgttagctctcacatctctgcatatgtgttttaagagtctttagataaaagatgaatcaaagtgattcagttctgtaagttttggactagaaatcagagtctctctggacatcatccgagtgtaaaatgtagcacaaattgcctttaaaaattaataatttaccaaatctatcagctatgcccagtctggcttgagaagataagtaaaataaatattgtaaagtcaatttttaataatctgtggcatgaaatttaagcacaagagaaaacatttagcaattaagcaggaacattcggtgcatgattaaatgtgaataataatacatatttaaaggcctcataacttacctgctagcaggaaatatttaaagttctaatctactacacagcacagctcatgccgtttctttgtttaatgagctcttgccttgtgattttcatgtttgagcagttactttgtaagtatttttacatggacagctacgtgtaaggctgacaaagagtagcacagacagatatgtggtgggggattgtcaggccagcgcagccacggaaaataatatgatcagatccttcatcatgctggtaaccagtggttggctgtattcatctaattattgagacagcacattcacatccgagggattttattataagaggtttataaaatttagagttgaagctgatctgtctctatctaccaaatagaagctggactcaggaccatggtttttcatgatgaagaatcaaatccttgataaatgatggcaggtcctcatcttccagaaagagggaaaaaaaaaaaaaaaaaaggcagaggaaaggaaatagctcggctgagaaacagagagcgagtgagcacagcgctgacagagagggagccgctgcctgccgctgagaacacaggctctgcacccagggcacagaagcaggagaagatgtaattctcgaggaccacattgattaacgcccgcccagggctagccacaaattagagccccgtcctgaaagaagcagtgctatgtcttgtaaggcatgcttccaaaggagcttgcattgcacacaccccggagcaaaccggcaagtagagaagacggacacttcccaatgaaagcgaaatgttcctgcctgccctgcgccgctcggttctccttcctctctctgctctcacagggtggtgttacacctccactgctctccatctagtgtgtttgtgcaacactcgcctccagggggagctcgaagctctcccgcccttcacctctgatcagagcactgatgtgagtcaggtccccaggatggtgggggcaccggctggaggagggcgggggctccttcagacctgccttgattaacccggaccaaaggggccctctgcactggagcgttacagtcaaagcacagcctgtgcacctgcccgtcggttccatagtgtttgtctgctgcttggtttgtgggacaggtggctggtcaggatctgcaggacctaaccccacccacgctcagctgtgaggagattaaagggtctcagtgtctcagggtcaggttccaggctggcttcttgcgatttcacagaagtcactaaatctttttgggtaacaatgggcttactcctaaaagcagtgggaggttgggggtcagggagcaatttgaacttattcttctctagattctctttcattacagagtcttattcacattgaataaatgtttattcatacctactgtgggccagacactatcctgggccctgggactatagcagtgaacaaagtggacaaaaatcctgcctttataaaatgcacatgctgagagttaagactcacgatgctcagatggggctgctgttgtggaagtcaggagagtccacgctgttagtgttgactgtttgttttgtcctttccattgtaagattcaccccattgcctcctaaagtgaaccccagggcagggaacatgttgacagggaggtggtctaatctaaatccagttagaacactcggagagctcctagactgaaacagggagaaggaagcacattttggatgattgtatttgttccttgatgggtctgctgaggaagagctatgtacccattgcatgtgctatttccatctcaggttatttgaagagaatacagaggagaagcagccccaggtacctactctagtggcagagtggcaggcttgaggtgcctgcatctgaaagctgctgtgagttagggaagcccccaccaaaaggcccaacaatgggcaacatcccccatcaaagccatggacatatccctggcaacagacttggctcttaacttccacgagtttttaagccaaggttggcaagaggaatagaacggggacgtcaaggtacatcaaaggaaagattcaaaatatatggaatccatgaggccacataggatatttcacagctttatgcttttctgataaatcctggaagacttaatataaggtcaggagttttcagtgctctgattcggtaaatttatttacagagacagctgtccgagggtggaataaggactcgggagtgagagggaggcactgtcaacactttcaggccagaccagcggctcacgctttggagaccggggctgcaggtgagggcacaggtggacctcaacccacctggacactccaccagaggggaaggcacagtgagaggcagtgccctgtggctgagctgacggcactggtcttggggcagggagaggagcccgtaggtcacaatggccttggtgaccccagcctgcaggtcacatgtcccttacctgggagccatctactctggaaaccatggatacctacacatctgtgcaaaattgacacagtgcctcagttatttgggtaaggctgaccagtgaattctgataaattgctgtaacaatgaccacccatctgtcaatgtgtcaccaagcataggctgtatacactgtgcagactgtaaggatccactgggctttcggcctgcggcacccaggtatgaagggcattagcgtacctcctatggccacacgcaaactccgcctggggtctaccccatcactctccactccattttgcagatggagcccaccgagtctccctagaaacaatggcttggatcctgggagcagtggcacccacctgtctggttcttatggccgagagccctgcagctagatgttctgtgagcctgtgttcccattttatggagactcagagaggtatttgccttgtgcatttctcctggagcttacatcactgaaggggacccttggccagcagtctctctgctccgagtccccgagtctccacaggtggccatggccattgggttccagctcagctcccacctttgccaccgccttcccagccctcgctaagctggagtcctggcccgggcccttgtcccagcttcacgccattgcttacacccttggccccctcccttcctgaaatcactgtccttcttttcccctctaatctgagtcctgtttattccttaaaactcagctcaactcccctgttctcactgagggattctgcaagcctcctagaaacccctccggcctcctggctcctgagcacccggccttgagcctgcagccaccttgcccagcactgcttggtcctggcagtgtggctgctgcgtgttcatggtgctagggggactcaaaggttctaggggaggcagggactactcttcctaggcctagttgtctttgctaccttcctagggcctagtgagttccatgccactgtgtatgcagtaggtccactatgtatgcagtaagatcactgtgtatgcagtaggtccactatgtatgcagtaagatcactgtgtatgcagtaggtccactatgtatgcagtaagaccactgtgtatgcagtaggtccactatgtatgcagtaagatcactgtgtatgcagtaggtccactatgtatgcagtaagaccactgtgtatgcagtaggtccactatgcatgcagtaagatcactatgtatacagtaaatccactacgtatgcagcaggaccactatgtatgcagtaagaccactatgtatgcagtaggtccactatgtatgcagtaagatcactgtgtatgcagtaggtccaccatgtatgcagtagatccactatgtatgcagtaggaccactatgtatgcagtatgaccattatgtatgcagtaggtctactatgtatgcagtaggtccaacacatatgcagtaggtctactatgtatgcagtgggaccactatgtatgcagtaggtccactgtgtatgcagaaggtccaacacatatgcagtgggtctactacgtatacagtgggaccactatgtatgcagtaggtccactatgtatgcagtaggtccattatgtatgtagtaggtctgcaaagactttgctgattgatctgaggaaggataagaggatatgaatgtttttcctgtggctctgggagtaagaagcgtttagggctacacacctaactacctcctggcctaatggatgctctgtgggcctgtgtgagagcaagaagaaaggctgaacacccctgtgagaaccatgtcagagccgtggctccaaaaaccacgcgagatggcatgctctgaggcctcttcctcgtgtttaatgactcgtggcaaagtgtggattctcgcggatatttacaaatgacttccgtttaccaccggacagttctattgctgagtggtctgatttcctggattatgtcctaagaaagtttaggacaatgcccctaaagtggtcatttagtgcccacggaagcttggtgctttgtgtgtcatgatggtgcatcaggagtttgcaaaaaaaaaagagagagataaataaaaagtaaaaggcacagatggggcatggacagcttctcattgcttgttccatgtgatggaactcaacacatctgctctgctgcggaaagcatctttgcactaatttgtttgtcagtgtccattgagaggacgatctgtcatcctgtcgcattttggttgccccgagatgtttgaagacaaggctagccacaaattggaactgtggccactggggagtaagtggtggaaaccaccagctgttctaagtaacatcaattgtgatttttttgtaaagatgaaatttcaacctaaggtctccaaaagcatttatcagctgcatgaaaaaaagctaatcaccgtaacagaagagtgagtctcttctaacgcacgtcctggggtgcgtgcgtggaagccttgttacagctggaaaagcaagagaagggggtggtcagaattcaatgagcctggagcctctgttttgctccatggtattttaagtctttctggtcaaaggtaacaagcattatcctgtaattggactacggtttcaggaacaagaattgagatttcattgtgctactgcatttgatttcctgatcaaatgctgtgatctggtcatggttctcctgccctatataccacctgtttctcaggatactttacgctgaatggcattcatttatttgggtttttgtttccctgaatccattttaatcttcccggagcatagagactatgctttgtcctagaacacaatagatgctcaacaaatgttgctttgattgaatcaattcaagtttgtatccttcaagcaatacctgaagtatctaatcttttatactgaatgtgttgctgtccaggattccagggatttgcttgcatactcccagtcctctgtcactgggcaggtctctgtggagcaccgcggtgtgggagcctgggctcgctcactccgcttagatcttgtagaagatggttggatctaagcagaaccttccatctacagcctctcaagttgccaacccataaaaaccagctgtgctcctggctcagtaacccttcagtccttgcctttctctgacttctcttccttgtcagcaggttagtttgtagcctgaactgcatgatggagattgagctggatctattttaattgccatgaagacatcatgggcaggaagcatgcatgctggaatagattagcaaacattgactcctcacgaaagccacagccttccaactgcaactcagtggtcagaggaggatgagcaaaagtggaggacagagaatgacccgacgtggagctgagcgggtgagggctaatctcacagaggcatgttactcaaaaatgcggaaacaggttctttcaggaggttagagtttccttcctcgactcaagcagtcattctgagcatgtggcatttgtcagaaggttgtgtttatgttttatgcttgatctataatgacacaacaaaactcatatagagaaggggaatcaagatctgatgtgtaaaagagcctgtggtttaaaatatggaggtattttgggctccctggtgagaggtgaggccaagcaatgcagcacacagatgagctctgcagtgccagcctcattaggtcggcctgcgtggtcctctgaaatgtacagttctgttgtcgtcactgtgtataaacagaacaaggagagaactgccttattcctgggcactggcctttttaaatcctttctttttctctttaaatttcatgttcccttgtcattgttgctgtaaaaccgaagccctcttctgcgtggcgatttggagaacacagtcagcatgcacacacatcattcttcaggtgcagttatgacagaaggatggtcctgtctcatccctacacctgtgaggcctcagttctgcctctctcccctgttgtggccttggaaggaaaagcctccagctctgagtctgctgccaggtggaggttcttccatttgataaggtgaggagcgtgaatggatggagctgagcttctgagactcggagaccagtgaacctgcttgccaccctgggcaagagagcccaggggctggcccaggagaggcggcaaggctgtgtgcagacactttgcccctggttgactcctgacggcgcttactccaccactgcatcccttctataccctgcttctcccttcagacaaggggcagactcctaagaaggcagctttgtgttggacaaaacacagtggggacaggaacctaaagcagttgtgaaagagccggaggacccctgtccccaaaccctgcccatcgggaagaggccacagagctatgtgtcggccccacgcttgggcagaccactgcaggcacgtgtgtactccgctgggctccaggggcctgattttttaacttatccctgagattgagttataaaatttagatcctccataagtagactcacatggagtcccagctgatttctgataagggtggaaaaggaattcagtggaggacaggtcacctttttagaacatggtgtgggagttctcagatgtgatgctgagtacaattcataaaagagaaaatgcagacatcagacctcatcagaattaaaagctgttctgttctgcagaagactctgttaagagggtatgagaagctcaagattaagataaagtatttgcaaaccacatgtctggcaaaggacttatgtctaaaaaaatataaagaactctcaaaacttagtaacaaagtcggcaataccattagaaacgggcaaaagacaagaaaagatgtttcactgaagatgatatacagttggcaaataggcatatgaaaagatgttcaatgtcattagccattaaggagatgcaaattaaaactacagtgagatgttaccatatacctggcagaatggcttgattgaaaagtggtgaccacaccaaatgctggtgaagatgtagggaaactggatcattcatacgttgctggtgggaaagtaaaatgttacagccactctggaaaacagtttggcagtttcttataaaactaaacatgcaactaccacatgacccagaggtcacatttttgggcattaatcctggaggaatggaaatttatgtttgcataaaaaactgtacatggatgtttatagcagctttatttataatagctccacactggaattagtccagaccaggtgttcatcagtggtgaatggttaaacacaccatggtcatacacactgctcaacaataagaggaaatgaactatctgtatacacaacttagataaatctcctgggaatcatgctgaatgaaaaaagccagtcccattttttttttttttttgagacagagtctcattctgtcacccaggctggagtgcagtgatgcaatcttgatctcggctcactgcaacctctgcctcccaggttcaagtgattcttgtgcctcagcctccagagtagctaggattacaggcatgcaccaccacacccgactaatttttttgtatttttagtagatatgaggtttcaccatattggccaggctggtctcgaactcctaacctcaagaaatctacctgcctcagcctcccaaagtgctgggattataggagtgagccaccacacctgcctccaaaatgtttttatgcctattttttttttttttgacagagtcttgttttgtcacccaggctggagtgcagtggtgctatctcggctcactgcaagctccgcctcccaggttcacgccattctcttgcctcagcctccagagtagctgggactacaggcacccatcaccacgcccagctaatttttttgtatttttagtagagatggagtttcaccatgttagccaggatggtctcgatctcctgacctcgtgatccgcccgcctctgcctcctaaagtgctgggattacaggcatgaaccaccacgcccagccttttattccttttatatgacatttttgaaatgactaaactatggaaatggagaacagattagtggttgtcatgggttagagattgggggctggggatgggagggaggggggtgtgcttatgaaagggacaacatggggaccttgtggtgaccggatgttctgtgttcttcacagtgatggtggacgtacaagcctccacctgtgataaaattacacagatttaaacacatgcacttacacacacacacacgcaatcccacacacacatacacacacggacacacacacacacacggacacacacacacacacggacaaggaaacaagtcaaacaggaaatctgaataaggtgggtggagggcaccagtgtctatattctggtctgaatcaggtgggtggagggcaccagtgtctatattctggtctgaatcaggtgggtgggggcaccagtgtctatattctggtctgaataaggtgggtggagggcaccagtgtctatattctggttgtgatggtgtgctctagttttgctagttgttatcatggagggaagccgggtatgaggtatgtgggcacttctgtaatgcctcttacaatggcatgtgcgtccataaacttaaaagtctaattaaaaattgttaaatgcttacagggttatatgagttttatgtttgcacaaatctcataatcaaaatcttaaatcatgatcatgaactgcagtggtgctcctggtgctgttttagctgatgaaattacattaacttgccttccgtaggataaaacgctcatcactcaaaagtgtacctaacagcctgcaaacaacataaactgaaacctttagtatgcagatggaaattctcattctcaataagaagactccgtaaagagaatatggtaaaatattagcctatagatttgggcccaacccacatggatgctgcagacgtgaatgcaggacaaaggttattgctctctctggtacacacatgaagcctgtctttccatgagaagcagtctctgtgagctctaggccttgcaagaagcatcattcagcttctatattctgctgatatgtttgcttaaatgaagatgcattagatatgaatcctgctgggctggtctgcaccatacttattaagacagtcactttgaatacctgattttaggaatcctgctaaagattagatacaatctttctcttccttatctaactgcttttttctataactgctatttttgcttttcctcttctctttccctcctctctcctttttcctcccctgtcttactcctctctcctcccctcatctcctttccttgttgctagcaaaaccactcttaaataacagctaagggaatttctctaaacagaaatgaaataataacagaagaaggcttagggcttcaaaatggaaagaacaacattgaaatgagtaaaaatcgtgctaagtatccttttcctcatgtggcgctctctatatatagaggatacttacgacaattggatttagaaagtatggagtgtaagagaactaagtgaaagtgaactttctatgctttactcgaagtggcaaggcactgatgtcagtagaccatggtgcagtgtagttgcatactgagatacaaagagcaactgataagaaaactgtaaaaggcaaatactaaaaaattgtgaataaatcaaggtagaatccttaagaatattcaagtaagccacagtaatgcaaaaaggaaataagcagaatgagaggcagaggaacaaacaaaacaaataataaaatggaagatttaagccttgatatgtcaataattatgctaattgtaaatggcttataacactaattaaagacagagattggctgagtggatttttaaaaaacccacaaaaacatgattcaacaatatgctgtctatgtaaaactcacttaaattacaatgacatatatggattgaaattaaaaggatgggaaaagatatactgtataagtagtaattaaaaaatcagtagccaggtgtggcggcatgcatctgtaatagcagctacttgggaggctgaggcaggagaatcacttgaatctgggaggcggaggttgcagtgagctgagatcatgcctctgcactccaacctgggtgacagagtgagactccgtctcaaaaaaaaaaaatcaggagtgtctatatgaaattatataaagtagactcatagccaagaaaatcactgaaggccaagagggaaattatataatgataaaaggatcaatccactgggaagacataactatcctaaatttagtgcatgttccaaacaacaaaacatcaaaatatataaagcaaaaagtgacagacctgaaatgagaagtaggcaaatcaatagttaccttggggtctgtcaacaccctactgtcagtaattgatagaactcctagactaaaagtcagcaaggatatagaagacttgaacaacaccatcaactaacaggatctaattgacattttagaatattgtcacaggatatgtcacagaattgccatcagcaacatagaatacacatatttttcaatttcttctgaaacactcatcaatatataccatatactgagctactaaacaaatctcaacaaatttaaaataataaaaatcatatagtgtgttccttgaccataaaggaattaaaccagaaatcaataatagaaagacaacagaaaagtcttcaaacatttggaaattaaacaacacacttctaaataacccatgtatcagagaaaaaatctcaaaggtaatacaaatgcattgaaccaaatgaaaatgaaaatacaaaagccacagtgttaagacgcagctaaagcagtactgagagggaaattcatagcacatttagcacttatacatatttataattgatctagactgcttacattagaaatgaagaaaggtctcaaatcaatggtgcaagtttctattttataaaactataaaaaacaagaaaaataaacccaaagcaagcagaattaaagaataaagatgagagaagaaatcaatcaaattgaaaacaagaaaatagaaaatcagtgaaatgaaactagttcttccaaaaaatctataaaactaaaaaatgtcttgcaagactgagaaagatacacaaagagagaaatacaaatctctggtattaggaatgaaataggtgctattactacagaacgtgtagtttttaaaagaataagggaaaactatgaacaattttaagttcacaaattccatacttagaagaaatggcttgtagaaaaccataaactgcaaaaactcaaccaagatggaatagctaacctgaatagtcttataaccattaagtgaactcataatttaaaatctcccaggaaagaaatattcaggttcagctccccgccacacttcagattaggtcaggcacccacttctgctttagttcctgttcttttccttcatgccatgcatcacagttcattataatatattaatatgattatcttattaagccactctcccagaatcctataaattccatgactatgttacttattttatgtctccagcataaagcctgacacctcatggaaaatgcagagatagtaactgaatgaatgaatgaatgaatgatatctttgaatgatagaaacatagctctcagggtgtcttatttaacttgtgatatattgagaaattgccctagaatatcaagatggaatttgtttggcttggcaatgtcttcatcattgacaaatattagctcatgaggtcagtcaagggctggctggctagaggaaaaagtaaatataggtatgaaggaagctcacgcccctaattctctgaagttttacacaatagagtttgtcttccatttcatgaagtctcagcccgtgactgtgacctttacctttttacttttgctagaaatattttttcatgagggtattttaatctaggatgcacgttcacttatctaagtgaaaagtcccaagtcgaaaagttccaaatctctttaatggaggttgcaattatgacttatttcctttgtctgggaacataaccttgctgtctggctgtggtacagattgccattcaatatacttatatgagtatgcttaatatgaatatgcttattcaaagcttattcaaagaatcaatgcaaaggtccccagggctccactttctcttttgctttgcattgttattgattattgtccttggggagatggtcaccttgggcagggaaggcccaggcatcccccaagggcaagggtggttctgctcagctggaagccagaatctcgcacagccatagcctcttcctaaatatctcctgaacaatgaatacgtggttcaatggatcctcagttttaaaggagatcccaggtgaagatgaacctggctgatatacatccttaaaaagaaaaaactaacaagccaaaaaaatctcccattttctaaaaaaatcctggtctggaaagaattcaagccatgtcaactccgatgtaagctttgggaatggaattatcataatcaaagagaaaatgaagtgaagagagtaggaagaggagtcatgcaaggaaaggcgaagcttgagaaagaacacggtgggatagccaggaccacagcattctccgaattgtggcagctggtgtgaaatgagggctggggtctctcgtgtgtgcccaggacatcttgcatgcatggaagtgctgcactggccaatgtcattctcactgccccacaagcctgcagggaggacgtatggtttgctctgtgactgattttaaagtgatctcagggaagaataggaaaaggcagagagtattgtcaccagggaagtggattaaaacgtgtggataagctgctgggtcgaagtctcctgcaaccctcatcacctccttacaaaaggaatcagtccggcttcccagatgcggacgttcaggtggtgaggttgtcggtgttgaggttgttgtttggccaagatcacatccatagatgactgaggggtggagcagggattcgatccactttgtccaaccctgagcctgagtgtctctcccaggcccacctcccaccaaccctgagttgggatgaggactgctgccctgccccactgacaggaaattgtggggagaacaatacaggaagttggaaatgcagcgcggagataatttaaaggatcagtagcaagaagttccatttatgtgtatagaatgtctaaaaaatttaaatgattccttcagaaatgtaataattttataaatataggtctaaaatgaatcaaagtttccgctaagatacacctcggtggaccctatatggtggcattaccattatgctgttgactgtaaatgtaactgaatgtgcaattatggtatcatttgacaagttggtgcatattgaacacatactatagaacacggaggctattttaatatttaggtgctgatttttttgtaatcagaaagaaaacaactatattttcaagtatacgttaaaaaagggtttgagtttcaggtgaagctattagattccgagaaggctgataacgagagatttaaaataacacgaagattcaggtgaagctattagattccgagaaggctgataacgagagatttaaaataacacgaagaggtgatgtacacagaggccggtatgagaaattccacattaactgtaatttgaaaatgttttgcctctcaccgctttctgcgttttaaatggaggtgtctggccctcactctccaaggcctgctgtctttgtgtcaggtttcagctcccgctggggcctcagatgtgtgggtgtggcaggccaggtctcactaacgcaggcctccgtagcaactgtttcagtattgactgggtggtgaagttgaacatcagaagccagtgcccttatacaacggctggaataggacaaaagcccaccaagagttttgcccgggcctttcctgggccttgaagcatgacaaaacaacgaaggcattcttaacaggacccatttagaattaaacaagttttactgggggtctgaagaaaccccccaaacctccatgatttagcagcagacaagataagggtaatcaccccggcacctggaccatttagatgacgtaaactcactgaggctccagaggaaggtcttcaggactcgaccttagttatagactagaagaagttcatcacttatgtctttaggggaatgaacacttacacgtagacatagagcttagaaggtacagaagctctggaaaactttgtcattctgagttggtctggcgatagtttctgctccttctccctgtaaccagttacagaaataaaaactccttcctcctcagttcatctgcatctcgttattgggcagagagaaatagcagcccaaccctcagtttggtccgggaacaagggcacttgggctcacagcttcgttgggggaagattcagatcctcaaaaaattgaagcacagcacggacctgggtcccctgggaggccgtggagcacgagggagggcacagaacccaccctggcccgaggccggctgtgcctccaatgagaggtgtccccgggctgtggatgcccaggttacggggaaggtggtgctggctggggggctgggagcagatgaacggcaggagctcagacaggtgttggtgagacaagagcggggctcaggcctgcttccaagccgatgcttttgcataaaatgaactcaagggagggtgtgaagctttcctcccctcagtgttactcctggtggagaaagcttgttaaagatgttctaatctctgctgtggtaaaagacaggaccattaactcagggggcctgtgttccttccgcttgagggcagagcctttgctgccccgggctgagcctccttctgcgcaaggaccattaacgagggggcctgtgttccttctgtctgagggcggagccttcacagccctggactgagcctgcctctgcaccatcctgcagtgtcctctcatccaaactgtggccgccctgccaggcccctctctctccttccacttcctgggcgagacttcagggttcacagcatcgttccaaaacctgcacgggagaatttaaactcaggcctgcctgcgtccagctcgggtcctgtcttgtccctggctgccacctgcctccctgctggccaccccagcaggcaacgtgaggctggaaggatgtggcctccgggaaggttttagtccacatgtcactcataatacgacattcagcaaaatgagtaaaaacgtttcgaagggaaaatgattttatagaaagggatgggtaacctttatgataaaattgctttgctagagcgtgttgcttgtgacagcaccacctttctgttcttgacaatgtttgtcttcttaactaaacaaacgttagctgagttgaatgaaattatgtacgaaccagagaagtcgggaggatgtttgaggctcgagcccccgtcatcaccttttgtaatataacttcattttgtaatggaagtggctcttgcgaggctgtgtgtgtgtgtacgtgatatgtgtttgcatgtgcgtgtgtgcatgcttgtgtgtgggtgtacaatgaacacctctattcaaatagagcagctcttcagaagccacttggattgatctgttaattttccagaattttacaatatggagaatcatcacaagggaaacctatactaccctagcagctactttttaaaaattctttttgtaattagcctaggtctctttttgttttaaagaaagtcttcactgatttttaacgatcacacttacttctcgtgagcaaaagccgataatgtctgcagtttgaaaggtaattatgcctggcttctcatccagcagctactctgatattccaaaataataatgttaccattggaactgggttattcttcatacgatactttgtagtattgtaaccatctttataataataaaaaggcatttatattatgaacacttaattttttgttttctaagatttcccacctctcaaagcttttaggaaagagaacattaaaagatgttaatgcacacagatacatctcaatttccctcggggagaagctaccttaactgccatttcaagttttacatttttgctttaaacgagtgatttcatttaaataaaaaagtcttattttctgtgatgaaaattcagctgctccttgtaaccctgaagcatcttgatttattattgactatatcctctttcaaggagaatattcttctcaaagacattatgcaggaattcttatattgcttactgtttggcattttctattaatctcaccacatctgttttcatgctatttggataaaaaaatcagaaaagtatagtagttacatgttttgataaatacaattgcaagaatcaacacattctgttcacctgaaggagcctgtctaatgtatgctgttagttgcattaaggaactcttagaaatttaaaaagcatttttaacagggcaaaggttttcttcagttcttttgtaaaaaaatgtacaaacttcactaaaataaattttagaaattactttgtaaaagacgtaaatgggaaaaaacattttatatgaatttgtcttccaaaaataatttggtatacatatatatatatacacacacacacatatatatacacacacacacacatgcacatatatatatatagctaactttccatatgtgtgtgtgtgtatatatgtggatgaacgtaaagttagttgtagcttattatgtcgtttctatgtatagttgcaattcatacatatttatagtacatatccatagagtcacaggacacacatgcttatggtacaaagactaagaagcgactccagccaggacgcttacagcagacacgcagccacgggtttattaggagcccgagtcaggtctcttatttgcacagcagttgtgtgcctggctgtgcgctgatctaaaaggcatctcctgccctaagagagttgagtgactcacctgagccgattgggaaattattaaggcaagaaatatgggaagaagggagggatccaagtgcatctgagccctgatgaggatcctggccttggaagagcgtcctgggcaggagtggggtttggacagcgatagcgggtcctgtggggaaggaagccagcatttcaggctggagcgaagcttctttggaggtgaaaagtgacacggaatgtgcaggaaacagtaaaacttaaaatgggcagaggatatgggacgtgtagggcagatggaataaacaggagcagaataactccagttaagctgagcagatctgctatctttaatcttcaacgcgaggctccccacctggggtctcacttcttaggaacattatgccagctggcatgaccccgtttactcatgagaaccgcttcgtccccttcccttcctgccacctctcactccctcctctcctttgggcagagtggctgaagcagggtgggcagacaaaggccctgaagaacactagctctggccttgggagtgagacgcaccttccttcccctcagtggacagagcaggtccttcactatggggctcctgagtctctcccaggatggaggcaggcccttcacgacagggctcctgagtctcctcagtggacggaagcaggttcttcactatggggctcctgagtctcccccaagacagaggcaggtccttcatcatggggctcctgagtctccttagcagatggaggcaggcccttcatgatggggctcctgagtctcctcagcagatggaaggaggtccttcatcatggggctcctgagtctcctcagcagatggaggcaggcccttcactatggggctcctgagtctcctcggtggacagaagcaggttcttcactatggggctcctgagtctccccaggacagaggcaggtccttcatgatggggctcctgagtctcctcagcagatggaggcaggcccttcatgatggggctcctgagtctcctcagcagatggaggcaggcccttcactatggggctcctgagtctcccccaaaacagaggcagatccttcactatggggctcctgagtctccccccggatagaggcaggtacttcacgatggggctcctgagtctcctcagcagatggaggcaggttcttcactatggggctcctgagtctctcccaggatggaggcaggcccttcatgatggggctcctgagtctcctcagcagatggaggcaggtccttcactgtggggcttctgagtctcccccaggatggaggcaggttcttcactatggggctcctgagtctctgccaggatggaggcaggcccttcatgatggggctcctgaatctcctcagcagatggaggcaggtccttcactgtggggcttctgagtctcccccaggatggaggcaggttcttcactatggggctcctgagtctctgccaggatggaggcaggcccttcatgatggggctcctgaatctcctcagcagatggaggcaggtccttcactacggggcttctgagtctctcccaggatggaggcaggcccttcacgatggggctcctgagtctcctcagcagatggaggcaggttcttcactatgggactcctgagtctctcccaggatggaggcagactcttcatgatggggctcctgagtctcctcagcagatggaggcaggtccttcactatggggcttctgagtctctcccaggatggaggcaggcccttcatgatggggctcctgagtctcctcagcaggtggaggcaggcccttcactatggggctcctgagtctcccccaggacagaggcaggctcctcaggatggggctcctgagtctcctcagcagatggaggcaggtccttcactacggggcttctgagtctctcccaggatggaggcaggcccttcacgatggggctcctgagtctcctcagcagatggaggcaggtccttcactatggggctcctgagtctctcccaggatggaggcaggcccttcatgatggggctcctgagtctcctcagcagatggaggcaggtccttcactatggggctcctgagtctcctcagcagatggaggcaggtccttcactatggggctcctgagtctcctcagcagatggaggcaggtccttcatcatggggctcctgagtgtcccccaggacagaggcagtctcctcatgatggggctcctgagtctcctcagcagatggaggcaggtccttcactgtggggcttctgagtctcccctaggatggaggcaggtccttcactatggggctcctgagtctcctcagtggacggaggcaggtccttcactatggggctcctgagtctcctcggtggacagaagcagtttcttcactatggggctcctgagtctcccccaggactgaggcaggtccttcatgatggggctcctgagtctcctcagcagatggaggcaggttcttcactatggggctcctgagtctcctcagcagatggaggcaggctcctcatgatggggctcctgagtctcccccaggacagaggcaggtccttcactatggggcttctgagtctcccccaggatggaggcaggcccttcactatgggtctcctgagtctccgctgcacattagtgctgacaagctgagcagcacctgggctccgagacagcctggattccaaactgaacatggccactgatgagctaggtgaccgtgggacagtcaatctgatcctcatggtgtggaccgtgtctaatattaaatctaatattatatctccagtccttaatattccacacctttgctacaaacgccttttttttttttttcttaccatctttaaaactggtagcatctggctcagagattgctttttggagccagagcccacgatatacccccacattgtgacaaaatttcaatgtcatgataatgaatgacatcagctacacataatattttcaattttaattcttagttttgcacaacctaatttatctgtagcctgtcctgggggcaggtctgtaccggtttcctgaaaaatgtctaaagtctaacataaattaaacaagattatgaacactctggtccaagataagctatgagccaagtgttaactgtaaagtggttcctaatgtgtttccaaagtccaacagaacaaatgcatgaaatgccaggagatgaaactgttttaagtaatgaaatggggtcctcaagagaacatgagcacagacttcaggtgagttttacagccatttttgtgccttagccaaggtgctcacagacatgacaacgaaaattcatgtgttcaagcctcactccagcctttgctagacctagaggaatgaatagctagcactattcattcacaacactgcaggatattttgtgattacactttatgggttcactggtggaccagtttctcagctcacttggtagtgtcagctgaatcatttccctaagtaggactgtcaggtagaccagatgtcagcttttgcatctgtgcagtagacgactagtttcacttgctgttgggtagttaataacatctgcctcctgaattgcctttcattatgcatttagagaagaatatcctagattccttgggaaaaaaatagaaaaaatatgtctagcaaaatcttttacctgcaacttatctaaaaaaaattgttttttggaaaagcaatattcctatctgctgtttttattgtttttgcttcagatgcactgtttttaacataagctttctaacatctgaaagaaagaagagttagtgtggttaatctttcagaataaagagacaacttctcagaggaaagaagatttgatgcagaaaacccattgtttacatatgattatttgttttggaagacactcaataataaataataacagttaaagatattttccaagtcctttagacatattatgtcattaaactcacattcaatccttcctatgaagtaggtattactcttcacttacacaaaatcacacaggaagtaaatcaatcatttttacttattctcatgacatatttgtctttttttctgtgacaatctattaatgttgtaaaatcaaaagaaattttaaaatttgttgaaatgttgacgcttcccatgcttaataatgtatagaatctcctttaattttcaaaattgacattgataataggatattcatctctgtattttacgcagatgagggaattgagcttagagaaattaagaaacttgtgctaattctgttattctgaattctctccttatactgtggaaataaatattcatttgattttatattacaagtcaattcccaagtaaatgtgtggatattcaacaccctggtcccaattaacaatgaagaaacaaaacaaaacaaaattcagtttcagtctgatttttaaccaatgcatgataaaacatccttgaaataggatctttctctaacttgcccataactataaagttaaataccccatggggtatattacgctaataaaatttaaacaatataactgtgtaagatctggattattcaaaatttctgcaacagcttatctccttattaccctgtcccaataaatagtttccctttttccaagaaccccttctggggaagatcagaagacagctcaggtttccctccttggtaggtgtggtttcctaatgtctttgtcaaatttctccctggttaggtcttgtctgtgtccccaccactaagcatcaccctgtggaattcatgtcttcacattttaatctaaattttaagtttcctctgtgttagtatatgttaatgtttcatgttttcagtgtggagctcaaaccacaggcctgctagagatggccatgctgtgcttgaagccaaactgaaaaaacaaaaacatccacacacaaaatagaaaaccagacattttcacttaatagctactctctcagttcaaataatgacagtgttattccaggctcacccaagtgctaccccgacaataaacattcttataaaatgaaaggaccagcagtcgtactcttgagagtgagacactgttcttatgagattaaatgaaaagatcaataagaaccaagctacctgttatactgtatatggtaaaagcacagaagatagaaaagttcagtttaacactttgccgttttgattttttttcttggaaaacttgggagagaaacagagaattctgacccagtataaaataaacagaccaagagatgctcgaggggtatgaccacctgagctgaatggacaagaggaaaaacaaaaacaaggaagatggggaaatgcaatgagccagtctgaaaagcgagttgactgtacttaaactgatagaagacagtaaagtaaatgagatgggacaagagcaaagagggatgaaaactacttcagcacaaaagactaaattgaaataacacctacaatgggttgggaaggcctggagagaagtgaatgaataaaaacaacaaacaaacaaacaaacaaacaacggaaacttctaggatgacaccaagtacaaagtgatgtaaatttttcctctaagtaggcataggccaagggggaaaaacacccaaattcaaagcttatttttctgtcctgtgcttgggactcatttttccttaggagagcttttgccccatttcatgtgggagaatgtgagaaacctggaacctacatctggttcttgctgaagacctttctttgccatttatgctccctcaaaactaactgtcttcagtttcctttcttattatgcaggcgaattaattctttaatgttaataatatattccatttgttaaatattatacagtttttggtctgccattcctaacaacttctttgattccccttgcaaattgaattagtatttttatttaaccatgtccttcagttttcaagttcttcagctattgaaggaatcgcctctgtgtgtgggaccagaggacaatgaaaaattcaacacctttctagtcaccattttaatgttttaagactattaagacattaatagaaacctcctttttttcagatatcagtatgagtttagctgatttcgcagctaattcctaatagcttggacttaagtgagaataaaaggttcaagagtaaaaatcgattaaatgagagttatctaagaatattgagaaagccattgcaagagatgataaaaactaaataaaaggaagactcgaagtcagtagattatctttttctggagagtattagaaaaaaaggaaggtaaagaaatgtttccttattcagcatgggggagtacaaatctaccactattgcaggttaacacaaatgctattcacccatccacctatctatctgtctgtccatctatccatccatccatccacccactcattcatccatctgtccatccacccatccatccatccatccatccatccatctatccatccatgcacccacacaccactctatccattcaccatccatctacatccattcttctatccatctattcatccatctatccatctacccacccactcactcattcatccatccatccacccacccacttactcattcatccatccatccactcacccactcatccatccatctatccatccatccacccacccatctatccatccattcaccatccatctatttccatctatctacatccatccatccatccatccatccatccactcattcatccttccatccacccagccatccactcacccatccactcacccatcccatccatccattcaccatccatctatctacatccatccatctatccatcctctatccatccacccacccatccatccattgatcatccatctatctacattctccttccatctaaccatccatccacccacacatccattcatccacccactcatccatccactcacaatccatccatctacattcatccatccatccatccacccaccactctatctattcaccatctttctatctacctccattctcccatccatctattcatctgtctatccatccacccacccattcactcattcatccatccatccatccacccactcactcattcatccattcatccacccacccactcatccatctatctatccatccatccatccacccatctatccatccattcaccatccatttccatccatccacccactcattcattcttccatacacccagccatccacccacccaccccatccatccattcaccatccatctacatccatccatctatccatccacccacccatccatccactgaccatccgtctacattctccttccatctatcaatccatccacccacccatccattcatccacccactcatccatccactcacaatccatccatctacattcatccgtccatccactcacccatccattcactcattcaccatccatccatctacattaatccttccctccattcatccatccacccacccacccatctatccatccatccatccatccatccatttaccatccattcactcaccatctatctatctacattcatgttttcattcatccatccacccaccaacccatccatccatccacacacccatccattcattcaccacccatccatctacatccattcttccatccatccatccatccacccacccacccatctattcattcaccatccgcctacatccatcctttcatctgtccattcgttattcatccctctacatcaatttatccttccatccatccattcatccacccattcatcatccatctacatccatccatccttccatctatccacgcatctatccatccatccacccacccatccacccacccatccattcaccacccatccacccattcttccatccatccatctgtccactcatccttctgtccatacatctaaactcatccatccatctgtccttccattatttacatgttgcatgtactcactagtaaatcacatgctgtgaggaaatcagaaatttaatatagaaccatgctcttaaaaacttattttttagttgagaaaattaaaaattgccagttaagtaggagaatacgctttcagtggtgcaaataagaacagtagtggtcaaagaaaaggaaagttaaaaggtgactggagaggccagggaatgagctaatgggctaataagctgacctgtgtgatggaaggaggtttgttaagagtgagacatacggttgatgatttggataagatagttatgcaatgtaaatgacaaaactctatagtgggtcattcaatattttaggggaaggaaaagcaggtgaaaaatccgtagcttttctttcgatattatagtccaaagtgagactacataaactctctctcaccatgtaaagctcctactccctagagtaaggttctatctttaacactgtaggacgaggaatggaagggagggggtgaaggaaacatgaggtcattaagttaatgctttgcgttgtcatggaccaggacaagaaggctgaaataaggttgtgtttttgttcttccactttctggacaaaattctttgggcaagtcatttagtctttctgaacctgtgcgtctccatttctggaatggaaatattattatttttatgactacgactacctcagatgattattgtgaagatgggaaagaattctgtgaactacccaaatggtacccccaatacacaaatcgtcatagtaagaaaaatagcaccccagctttctggacatttgtacaaatgtacaagctatgttacatgcacctgtttattcagtcttcacaatgactttatgacacagttgttactatttttcccacttaacaaatgggcaaactgaggcagagcttttcagtggcacagtgggtaagtatgagtgctgaggtcagggcttaggcgggggcgaaggcatgcagggaggcggtgctgaagcaggagacacgctgggcacagaggcagaaagcctgggctcccattcctgtttgtcagtgaatagctgtgctcctcagggcagtcacttgaactctgtgtgccagttttcatactttttaaaggaataatttttcatctctcttacagtgttctcgtgacagttaaaacgttcttgtatgcaagttcgcctattatagtgcttggttcagagtggactttgataagttttgctttcttgtgaacatattcaacgatttctcacttattgatactcctgccaaagtgcctgacttaggccccgggagggttgatggcctcagagggtttcgacctacgcaattgtcaagggtttatttcattcttcttaattgaattatagcgcttgggttcttgaagctcatgacttcatttaggaaatatttgaaaattgattatttaatcacttaattgtaaaacacgaatgaaatttcttagttaattaaagctgtggataataatttaattataactttatatgccagatttactcaaagcatcttaaggatgaggattcaattagcagccttcggatgcacgggtcagtgggatactacctacagcaacgcgtggaatggcttagagcagcatagctagcagcgctttataacagaagcttggagagcaggacacagcttctggctccacaggtatctgagattatcctggaaaaattatttaacctctttaggtttcagttttctcatctgtaaaatgggatttttatatctctttccaaaagatattgtaaggatcaagttattttcccctgtggctcatggcaggtaacaaccaacctggctctcaggtgtggggagaaaggagatggctgtaaaggatgtcactgtcattccaccaggcagaacacaatgggaagagagtacagaagtccagccatacagcttctgcatttttgagtgaagacagatcatatgtaattttttttttgtgtttgttttgtttggttgctttttaaaatgtgattgcagcttcaggggtacatgtgcaggtttgttatacaggtaaacttgtgtcacgggggtttgctgtacggattgtaatggcaccaggtaataagcatagtacctgattggtagttttttgatctccatcctcctttcacctccaacctcaagcaggccctggtgtctattgtttcctttttcatgtccctgtgttttcatcatttagctcctgcttacaagtgagagcttgtggtatttggttttctgttgctgtgttagtttgcttaagatcatggcctccagcttcacccacgttgctgcaaaagacatgatcttgttcttttttatagctgcatagtattgcatggtatctgtgtagcacattttctgtatccagtctaccactgatgggcattcaggttgattccatgtatttgctattgtgaatagtgctgcaatgaacatatgtgtgcatgtgtctttatggtatagaaaaacagtattacaaacctataggctaaattgatgttctttagttatcgagggggaaagataattatatccttggtggtgtttgatttgtgtaatacagatgtttgaaacaaacatgttagtggtgttggaaaacatataagacagtatctatgaagaggcgaggggaagattaggttttgggctgacaggctctctctacctccatgaaacaaatgtgaatgagacacagggtatggctccctttgatatttaaatgttaagtgtctactccaaagtgaacatgggttttatgtatatgcatgtgtcaggactcccttcatgaatatccacagctccttctgtcacctgttgactatgtatgtttagccaacctattcagcatagagctgctgcccaaatccctcctccttggaagtgcccatttctggtcttggcaggaagctcttcttcccagcctgtgagattgccatgcttctctcaggtgctttcttatgaaagttttcacagatcatttgcatggtaatagggtgcatggacaagcccatctcacatagcttcttatgttaacatctttatttcctgcagattgaacctagaaagactggttgggccagacatgtaagtttccctcagtccagcagctaagcaggaactctgtgccttatatggccttggaaaggaaaccgtgcttggtctaaatcaacagctttcctttgtcgacctagcactgctggactgtaatactaactttaaatcaaaggagccatacccccccagaagccaccgccttcccaccaacagccagagcctcagcctgccgaccccatgactgacatctcaggggtccccagctcatcttgtaagcatgaccaccctgtgcacactgcaccacaggacacacatgcagcctgatcctgcccatacactctggagaagcgagttcggggagaaaagggttctgggtaattgtgtcctgcacaccgggattcaagaatgaatggttgcggtcactggtggtcctgcctccatcctcggtctttccatgagtctggatgagaccaggtccccctcacccgagtgacccccactccttttctttattgccaggaacagtcagccccacatgctattatcaacaactgtcactttcccacatttgcccaagactctgcctcggtcagggctgccctttggccagtatcccttagttttgtattaggatctggtgagatctcccagctggaccccgtgccccttcacttccccgtgacccatcctgtatcagcctatatcattcagctgccccctccactgtgctgagtgtgtgcaatgcatccccatggtaaaagttcttcagaagtcccatatccattggtcctgtgtgttttctccccttttatcccaggtgtctcctgtgacttctgcttcctctcccctaattcctttcaggaccctctgcactagcacatcagatagcttcataaagtctcctggagcagaaattagatgctcatccagagagaattcccagaggagaagccgaagagaacatgtctgaaatctcatgcaaatccctgagagtcaggacctcatgggaagaaattcaatgtattcctttaaaggcggggacacagtgaggctcatcctcagggctttgtgcaaagtgcttccctccagattgaaatataggccgtatctccaggtccaatttaatctctattaggcactcaatggctaaattaaggactttacggatacctaatttagataaacccttaactattaacctccaataatgtcatcatttcactgagtagaaaagaaaacatctgggtgagttcaattagccaagggcatggaggagaggcctgcacagtgcctgtgcatgctaattttgtctcgctgaccctgacggaggggctggctgcaaggaggccgtggccagcatgacgcttgaatggaaggaggctgccgccagtatgacgcttgaaggtggccaccctgccctcctgggaagagcttcccgagagtctccacactgagagcacaggtggaggctcccgtcgagagggagctccccacgctcccgtcgagagggagggaggaattcctcctgcatagccctggtcctcagttacaagcctgcttcttttcctgccctctgaaaatgaggacaactcatcttattttatgcaattatagtctgttacataaaagacactaataatctttggaaaatcattatgggtgtgtctgtccacttcgtttcctgctgctggaagggtgctttttctttagccgctgtggctgcattttggttgctgtaggaggcatgcagagctgcccctgcctcccactctcgtggcttcggtgatgattcagcaccggactctgatgtcggatgcccggatggtgcctcctgcacctgcaaatgcctccctcgcccccttggatctgtcacttattgtgttcacatctaccgtttgctggctccttttgttgaggatgtctggttcttccccaggggaaactgatcacaaagaggactgaacaagaacaggctgcctaaagctatttgacgaggatctgagtgcaggtggatttattctgaaggtcatggcagggaacatgggtgagtggcgaggaagggaggtgaggggagacagaagcccctgcttgcatggggcccctggggctttgggggctgcaggagcatgccttggtgttgttccagcctgaaaacccaagatttggggtgttatctgccacctgaccctccacgagctgaaggctgctgctgaggggtgggaaagtggtgacttttgggtgaccccactggccctcaccatagctgggcacagcacacagtcagatgtgctgtcagggagctcctgcgaataggcacagcagccttgagaaaagcagagggagctgatggtgtctgctgtgtgcaagccagaaacacagagagatgtgtgtgccaacaaaacctggaaaataaccatgtcctcatagcctggggactctgggaagtcctacagcaaagaagaagcctggtctgcccatctttgtgtgacaagtgtttgcaggaaatagttcatcaaaaaacactttttctcaggagacaactaggaatcacctaggacacactatgaaatggtgaaccagcgatacaggtgaaagtgccctcccagtatgggaaagacggcagagtattcaacagggacacaggagcggtgtttatcctctggagggagcaaacagtggagtgtgcacctcactcagccaccaactttgcacctggcggtgctgccctgacacctgaggactcatagggccaagtgaggctcagagtctgaggcaacttggactgatccttaggtggacagcaggatgacagccacctgtgcaggaagagggaacacagctgcagagaaggggacacacctgtatgaggaggggacacacctgtttgaagaggggacacacctgtatgaggaggggacacacctgtatgaggaggggctcacctgtataaggaggggacacaccttcctgagaaggggacacacctgtatgagaaggggacacacctgtataacaggggacacacctgtatgaggaggaattacacccatatgaggagggacacacccatatgaggaggaagtatacccgtatgaggaggaagtacacccatatgaggaggaagtacaccgaacatacttgcagaggaagggagcccccaccatgtgccagggccccatggacatgagatcatgagagacatctggtctgtcttctcgcccacatgtgagacagatgggaagttccagcattttgtttatagacttagagaagggaatgagtggatatttttttttagagaggtcacaggacatctcagtggcttgttaaaggacagccttatgaacggtacctaggaatcacggatgtggagttggaggcagtgtgggagctgaggggaggcctgctgccatgcacccctgctggtcagagcagatgcctggccaggaggctgacacaccaccttcagatttggccgctgccaccatcacacctctgggtgtagtttgatccgagacagcagctttccagctgcgggaattcagtggcatgatgacagcatacacagggagacggcaaatgtgaaagcactggtcaactgtcgcacatgtaaatctaagtccatggcccacaaaaatcagctctgtgtcttgggtttgaataattgtgggaaaaatagtaataataataataacaataataaaaaaacttcttggttttctctctctccatgactttctagttcttttactcagctcaaaaactttcttagaaatacaggtgatgccatggaatactatgcagccataaaaaaggttgagttcatgtcctttgcagagacatggatgaagctggaaaccatcattttcagcaaactaacacaagaacagaaaaccaaacactgcatgttctcactcgtaagtgggagctgaacaatgagaactcatggacacgggggttgggggggggaatatcacacactggggcctgttggggggttgggggataggggagggacagcactaggagaactacctaatgtaggtgacaggttgatgggtgcagcaaaccaccatggcacgtgtatactgtgtaacaaatctgcatgttctgcacatgtaccccagaacttaaagtataataaaaaaagaagacatgaaaaaaaaccttttgtatttttagtgagcttatgcagctaataaattcatttaaaaaagaaatacaggcaacagcagtggctctccacatcagtgtgtgacagtcaccaggctttgtcacaatgcatcctggtgggccgcgcagagcctgggcctcagtggggttgggccgggcctgacaatctgcatttccagcacgtcccaggtgccactgctgctgtcattggggccacactttgaggaccctgggtctgtgacgcctagtcccttacctagaatttaattccacatcctctcttccctcccccacgtctgcaaaacgtggccttgaaggagttgtatcagcaagacgttagacaaggcagctcttccctgtctccccatggaaaaaccaagtaaatcatgggcttttccctttgctgattgtgccctttgatgctcaagacatttttaatgtgatgacgttcaatttctttctgccttttgtttcttgagcttttggtgtcacatccgagaaattcatttgccaaatccaatgtcatgacgcttcccctatgttttcttctaagaaggttttagctcttacatttagatctttgatccatgttgaattgatttttgtatatggtgtaatgtaagggtttaacgtcattcctttggatgtgaatatccaggtttcttagcactgtttcttgagaacactgtcctctctccactgaatggtctcggtacccttttcgaaaaggcaacccacagaatgggagaaaatacttgcaaatcatagatctgatacgaattggtttctagacaatattaaaaattcctactactgaacacacacacaaaacaaagaatctaattaaaaaataggcacaagacttgaacagacgtttctccaaagaaggtaaacaaacagccagtacgcacacggaaagaagctcaacgtcactaatcattagggaaatgcaaaccaaaactgcgagttaccgcctcatacccactggaatggctactgcaagggttagtgagaatgtgggaaaaaatggaacgctgtgcactgatggtgggaatgtaagatggtgcagctgctctagaaaatggtgtggctattttcagaaaattaaaaataaaattgccatatagtcaagcaattcttctagttatatagtgtattggtctgctctcatgctgctaataaagacatacttgagactgggtaatttataaaggaaagaggtttaatggactcacagttccacatggcttgggaggcctcacagtcatggcagaaggggaatgaggagcaaagtcacatcttacatggcggcaggtaggagagcgtgtgcaggggaactgccctttattaaaccatcagatctcgtgagatattttcactgtcatgagaacagcatgggaaagacccacccccatgattcagttacctcccactgggttgctcctatgacactgggaattgtgggagctacaattcaagatgagatttgggtgggaacacagagccaaaccatatcatagacccaacgaaattgaaagcagggacttgaagagaatttatacatccatattaatggcagcacaatttatgatgggcaaaatttggaagcatctatccattgacagatgaatgtgcaaagaaaatgtggaatatctactattcagctgaaaaaggaagaacattctgacacatgttacaacatggatgaaccctagggaccatctacaatggaaactaagccagtcacaaaaggacaaacaatgaacaatgtcacctgcatgaggtccctagagtcctcacacccacagagacaggaagcagagggtggttgctggggccggggagggtaacgggcttaatgtttcgtggagacagtttcagttctggaagatgaaactttctgtagacggatggtggtgattgctcacgactgtgtgaatgtacttagtgccaccgacctatacactcaaaagtggatcagagggtacattttgtgttatgtatattttaccataatttaaaaaaagaacagaaaaaagaagacccttgctgagctttacaagcaactcagtcttgtcttcaaatattcttcatgaattgagatggtgccaggttgctgtttaataccaacaagcgacagaggaaattctaaataagtttagtcacgttgtagaaatttgcttacgaaacacgagactggaatcaaactcctttagggcttttccccctcagtggaaagagtggataccttgtcactgaacaacgtgattttcccaggtacagtttatttacaggcaaagccacatcctgcttacacttatgaatagttggcagctggctttagtgaggatggattgcaggtgagaggaggaactttgttaaggaccagatgcttccctgttcttttgccaggtgcaaatcaagcgccacctggaagaaatgtaatcatttgaaatgtctttaaaaatagtcactctctgaatttaaaatgttaatttaaaacaattatgatgagcaaaataattaggaaatacagacttcctaagttagggagccaggctattcagactatgatgatattgaattacttatgtatcatggatgaagcagctagatctaaatgaacaaaaataaaaaaaaagagaaaacagaagattaaaaagattaaaaagaaaacaatttgatgtgtctttatggaaagttaagctctggccagagctaagttggaggtattgctgtttctttctctaaaaaagtttaatgtgttcgatccagttttttcatagcattagaaaaactctttttgggattgttacttttttaaaaattaatattcttactactactatatttgagggaactgagccatttacgattgtcaatttccaaatttcttcatggatacagattcatttctgattcattgaactgcaaacttattttttatagggaagaactgaccaaaagcaagcgatttttatatctagaaactattccccccttctgtctatttctcacctatcaccacacaaatacgtcttccatgaacgcaagcaaaataacaaataatattaaacaaaagggattcgtttttctttaatgtatgtcacttaaaggattgtactagttcagaacttggcgaactcatgcatagaagagtggttgaaaagtttcacttataatagcacattcagaatagatcatatggctataattatttgtatgcttttccaggcacattaactaagctaaactcaatacatcatttcatgcataattaaagatttaagatcaatgaaacttactctctttatctagtttcacctagggacccggcgagggaaaaagcttagaaaactttttagacgttatctactagtaagaacggaaaccactgtaattccttgtccctgtgttaaacaatactgggaccagcaaaaggatcttccctgatttctccaggaagtacctgcccgtgagagctaagcctaggaaccaaccaaccaagtcacttccttctcaacaccagcaacggctcctggaggctcctgcccggaagacgtctgctcttcctaccaacctaaagtttcctcattaactttgctccatacaagccagttcttggctctcatgcctcccgtccccggcccaaaacctatgaacaccccacactaattttctgctcttagctcttgccaggctgcaacccccacctctctccagggggtctcgtgaacccagctctgcctcagcaacgatcctgcaagggaccattttggggacttgaaggttgatggaattaatcatcaaggtgtgctcgagacgcgcggggcgtggtaaaaagggtcactagtggccctttcttgccctttccccttaaacatatttctcttttactttgggtaaaataaatagttgagacttctgtaagaaaataggatcttctgactgcccgagaaagatcaatttgtgtttttcttttgagacagagtctcgcactgttgctggggctggagcgcaatggcacgatcttggctcactgcagcctccccatcccaggttcaagcgattctcctgcctcaacctcccgagtagctgagattacaggcaagcgccaccacgcctggctaattttttgtatttttagtagagacgggggtttcaccatctctgcccgcctcggcctcccaaagtgctgggattacaggtgtgaaccactgtgctggcagaaagatcaatttcttttcttggaaagagatgacatggcacaatctcctgggacaggttttcatcctaaatgatacattttgcctgaacaaaataaaaccactcaaaactacaaaggaaatcttcagagaataattttctggacaactggaataagaaataaatttagacataaggctcagcttgctgcagaggagtggtgagcatgagggctggccagggcgctggacacgaccattgagacacaccagtgtccacctctaaccctgattccaggagggttccgagttcgctgggacaagccatcctcactttaaggtgccttctcatctcagggtctttgtcttctgatgctcctggggccaggcttctcccagctgtgggtggaaggtgcaccccattaacccacacacataaaagcgtattgctgcagcttaggagtctctgctatgactcgggaaataaaatggaatcttgggaccccacactcactctgccaaaaagaaagttacgcttcagagctgagccacgcaatactgctttccttttgttcctggacacagagctacaattccacagcctcatctctaagccaggttcccacagtgacagaaggccacatagctccctgatggcctccctcacaaactgctcacaacgaaattcctggtgaactcctaaatccctcagcctttcaggatagatatccccctgtttctagccctaagactgagttctgtggaatctcaccctgacaatgtcaatgaccagctcgtcttcataggtagagggcaaagactggaacaaaaatcatccctccacccaacccgaggcgaatgcatcattggccttttcctgcaccccttctctttgcacgtaaaatgtagattcacatcaaagcctccaagaacgtaaccatttgcctcattgcttaccctccctcctttctctcctgctctttcccctttaaatatcgaagttccccaaacgctctttagaaaagtcgcaggtgatggacactcatgtgacttttggttcttttcccagacgcatcgtcacactcaggccaaacaaacctctctcaatggaggtgtcactgtggtgaaccctctctaggcacgtgtccatctgtctgaacctctggaggtctccgcaggaagaacagcgtgcacccacatttaaatttcttgcgaatacttcccatctgcaaaataggatcttctgaagcttgcagttgctgtcaatctcctggccctaatgagctgccaggagaagaaggaaaggtcccacttgagagtgaaaacttggggtctcacagcttctctttctctgatgaaacaattgaggcttttctatgaaattaagcttctttgcattttaatatatattataagttttattgatcactaaaaacaatgaaaaaaagaaagtcaagaagccctgctcaagaactgacaatgcccctcttagccctatcctgggagaggctcacctatgcagagggaggccccgcagaccccttcttccttctccacttgggggtccaccgctatggcttccacggtgccctctggtctggcctctttgcttttacatttttctgcctgcccctcactccaggagctaaaaatcaattagttcttaaataacgagggcggtagccacctacatgaacctcatggggaaggcttctgtaaaatgaagacccatccagcagcgaacgtagttttttcctcatgtgtacatttctaagtttaacactagatttgctacaagtgtgacggaacaaacactcgacggaacaaacactcaaagaacaaacatatttaaaaaggtacttttcaaaagaagacacttatgcaggcaacaatcatatgaaaaaaagctcaacatcactgatcattagagaaatgcaaataaaaactgtaatgaggtaccatctcacacaagtcagaatggctattattaaaaagtcaaaaaataacagatgctggtgaggttgtggagaaaaaggaacatttaaacactgtgggtgggagtgcaaattagctcaaccattgtggaaagcagtgtggtaattcctcaaagaaccatttgacccagcaatctcattattaattatatacccaaaggagtataaatcatctatcataaagacgtacgcacgtgtatgttcactgcagcactactcacaatagcaagacatggaatcaacataaatgtccatcaacgacagactggatacggaacatgtggtacatatacaccatggcgtactatgcagccctaaacaaaactgagatcatgtcctttgctgggacatggatggagctggagccattctccttagcaaattaacatggggtcagaaaaccaaacacctcatgttctcacaagtgagagctaaatggtgaggacacaagggccaggcgcagtggcttgtgcctgtaatctcagcattttgggaggccaagggggggtggatcacctgaggtcaggagtttgagaccagcccggccaacatggccaaaccccgtctctactaaaaatacaaaattagctgggcgtgtggcacatgcctgtaatcccaggtactcgggagggtgaggcaggagaatgacttgaatccaggaggctgagtttgcactgagccggattgggccattacactccagcctgggtgacaagattgaaactctgtctcaaaaaaaaagaatgatgaagccacatggactcagagaggggaacaacacacactggggttgttggagggtggaggcgggaggagggagaggatcaggaaaaataacgaatgtgcatgaggcttaacacctggctgacataatctgtgcagcaaacctgcctgtgacctgagtttacctgcgttacgaacctgcctgtgacctgagtttacctgtgtagcaaacctgcctgtgacctgagtttacctgcgtaacaaacctgcctgtgacctgagtttacctgtgtagcaaacctgcctgtgacctgagtttacctgcgtaacgaacctgcctgtgacctgagtttacctgcgttacgaacctgcctgtgacctgagtttacctgtgtaacgaacctgcctgtgacctgagtttacctgtgtaacaaacctgcctgtgacctgaatttacctgcgtaacgaacctgcctgtgacctgagtttacctgcgtaacaaacctgcctgtgacctgagtttacctgtgtaacgaacctgcctgtgacctgagtttacctgcataacaaacctgcctgtgacctgagtttacctgtgtaacgaacctgcctgtgacctgagtttacctgtgtaacaaacctgcctgtgacctgaatttacctgcgtaacaaacctgcctgtgacctgagtttacctgcgtaacgaacctgcctgtgacctgagtttacctgcgttacgaacctgcctgtgacctgagtttacctgcgtaacgaacctgcctgtgacctgagtttacctgcgtaacgaacctgcctgtgacctgagtttacctgcgttacgaacctgcctgtgacctgagtttacctgcgtagcaaacctgcctgtgacctgagtttacctgtgtaacgaacctgcctgtgacctgagtttacctgtgtaacaaacctgcctgtgacctgaatttacctgtgtagcaaacctgcctgtgacctgagtttacctgcgtaacaaacctgcctgtgacctgagtttacctgtgtagcaaacctgtctgtgacctgagtttacctgtgtagcaaacctgcctgtgacctgagtttacctgtgtaacgaacctgcctgtgacctgagtttacctgcgttacgaacctgcctgtgacctgagtttacctgcgtaacaaacctgcacatggacccctgaacttaaaagttaaaaaaaacaattttatgtgcaataccgtgacaggttttgtggctaaatttaaatgttaatttggacattatatattctgttgtttttgattgtctactcagatgagaaaagtagtcaacgcaatcaacttccttaaaatcagtatctgctgcacgccagggacagcaacagaagaaatcatttcagcaacaacgtgacacttcgaacctccagaagaagtgccatatcaatgacatcatgacaaacgccccagaccgaattatttctgtgtcagagtcactcattatggctctggctcttgcaggtcatctcccatttaggagaacttgtcctattgtcttcatcagaacacgtgtacttgtcaggcctgcagtcctgatgtttggttcagaaaatatggtcactgtaattatagcccttcccgggtgaggaaatgagaatctgactcgtaatccttttatcattgacttggatgacttatttctcaccaaatgagaatggagaaatttcaagggcaatttatctaattctttccctgtgcatatatatttttttttttaaagaaatttgccctggtcagaaaaagcacattttccagagggattctttaatgatattgatctcttgtgcattacctggcctctggtagaccttacatgattgtcccaattaagctgccaggtgagtttcttaatcttttttttttcctttttttcttgaagcatcacagatgattttaaagttgtttttaggccaggtgcagtggttcatgcctgaaatcccagcactttgggaggccgaggcgggcacatcacctgagaccaggagtttaagaccatcctggccaacatggtgaaacaccctctctactaaaaatatgaaaaaattagccaggcgtggtggcatgcacctgtgatttcagctaccggggaggctgaggcaggagaatcgcttgaactggggaggcggaggttgcaatgagctgagatcacaccactgcactccagcctgggcaacagagtgagactccatctcaaaaaaatattttagttgttaattattaaaagttgttttaataattactttgccatcaggttctattttcccaagcaaaatgctcacggtgtgtgttcagcttctctgcccctcttggcaggatatagccattccccgctcagccctgcccacttcccaccacccccaggccccctgagcacccagcagcaaccctcagccagagcctgcctcggccacagctcagggctctgccagctccactgttgaagcccttatgtcacctgtgtgtgtgttctcttggccaagtgtccccagcaagccctttagtgaaagagagcttcaaggggagaggcaaaatagtggcaaaaagcaaattattacagcctgtgacaaaaggtactccacacaagcctctacctgccgccagggctgcgtcctaaccaaagacagccaggcaatgatggtgactttcagaatgggatgaggctgggggcttgagagttgcccagttagggcgtgtgcatgagtgtagtgtgcctgtatgtgcctgtgtgtatgtacatgagtgtatgtgcctgtgtgtatgtgcctgtgtgtatgtacatgagtgtatgtgcatgtgtgtatgtgcctgtgtgtatgtacatgagtgtatgtgcctgtgtgtatgtacatgagtgtatgtgcctgtgtgtatgtgtgcatgtgtgtgtgcctgtgtgtatgtgcatgactgtatgtgcatgtgtgtatgtgcctgtgtgtatgtatgcatgtgtgtgcatgtgtttatgtgtgcacgtgtgtgcatgtgtatgtacatgtgtgtgtctgtgtgtagtgtgcatgtgtgtatgtacatgtgtgtatgcatgtgtatgtgaatgtatgtgcatgagtgtaggcataggcatttatataccattgtgaaggagataactgataaatagaaatgttatttaaaacaagaaacagcctcaaaacacgtcctccactccggatgcagtagggaaagtacgtttctggggttgggtggggtgggacgcagctggtggggcaggtgggatgtgtgtccatttagggatgcctaagtgagcggagcatagtaaccagggtcatggtgggtttgtgggccattgagaaggacgtgctctccacgtgatgagtgggattgggggctgcagcgggggcacaggaagtcagcccacggtgcctgggtggtgtgtgggggcagatgcctgtggtgttcagcagtgtttcctctctggggcgttcacagcatttggtggaggccgctattccagcacttgtcacacagaatccctgcgtgtggccctcgctgatgaagctgcctcccgccctcctgtgtccctggtccctgctcagaaacctccgtgtgtcgttggcaaagaggagcgtgtcctggtccatgatgcagatgcagacacgggtagaagaggcagcaggtttgatgccgtcagcttttccgctaaagtggttaacccgggcttaagaagcgcgcgtattcatctcagaatgagagtctatttacgtctcataaataaaataccttcattttttctagtgtgtacaacaaacaaaagctctattttatttttcataatagacccagacatgattctgtctcaacttgtgctactgaaaggatttctggcacaagcgtagcttaagattcaacttaaatagtttgggccttactaagaacttgtgctctttgaaatgcactaagaatgaaaagagaagccacagacagggagaaaatatttgcaaatcacacagccaatgctggaccagtatccagaatagggaaagcactctcaaaattcaaaattaagaggataaataacccaacaaaaaatggtaaagggatttgagcagacactttgccgaagaagacatatgagagacagaagaacacaaaggacagccagcaccatcagtcattaggaaagcgcaaacgcaaacccccataagacgcctggacacacctgcgagagtggctgcaataaaacaaccacagagaagctgatgacagtgaatgctgacaaggatgtggaggggccaggaccgccacacacatgcgctgggggcagtcacagcgggcagtgtgccggagaagagggtggacacacactcccccacacacgcgcggggggcagtcacagcgggcagtgcgccggagaagagggtggacacacactcccccacacacgcgctggggacagtcacagcgggcagtgcgccggagaagagggtggacacacactcccccacacacgcgctggggacagtcacagcaggcagcgcgccggagaagagggtggacacacactcccccacacacgcgcgggggccagtcacagcgggcagcgtgctggagaagagggtggacacacactcccccacacacgcgcgggggccagtcacagcgggcagtgcaccggagaagagggtggacacacactcccccacacacgtgctgggggcagtcacagcaggcagcgcgccggagaagagggtggacacacactcccccacacacgcgctgggggcagtcacagcgggcagtgcactggagaagagggtggacacacactcccccacacacgcgctgggggcagtcacagcgggcagcacgctggagaagagggtggacacacactcccccacacacgcgctgggggcagtcacagcgggcagtgcactggagaagagggtggacacacactcccccacacacgcgctgggggcagtcacagcgggcagcgtgctggagaagagggtggacacacactcccccacacacgcactgggggcagtcacagcgggcagtgcactggagaagagggtggacacacactcggcggaggccccggtgacaccagcctcagtcacctcccgcagggtgaggacgctcacaccccctccaagacccacacgggactgcccacagtggcttggttcatcgtcaccctgaactggaaacagtgacatgttttcctatcaggagaatggaggagttaacacggctcctccctgggatgaaacacgacccagccatgcccaggaaggagctgccgacagtgaaactcaagacacgtcctgctcggtgacaggcacgggctcaggcgactgaggacggctccgtttatgtgtccttctcaaaatggcaaagttacagggtcgggaggtgaagccatggtctgtagaggctggggtgggaacaggaatgggccacagagggtgcgagagggttccaggtggtggacctattttacatttgatggtgcttttcagccatgtgtgcttgtcaaaacccagcaccgtgcaccaaaggactgaattttcctgtgtgttaacgatacctcagtgaaacctcagccaaggtgaaggaagcagccagggcttctcttagttggaaaacatcgaaggagtgcttgcagctgcctgcccctccgaggcaccagggggtcggggacgtcactgtgtccttggggaccgtgacgaccgcagtgccgacacagtgagccccagaatcgccctgtagaccagctcactcaagcaaagctgcctctggcagggcaattcccctgtagagagtgtgccttttgactttacctgtcctcagactgacctttgctcatgagaatagtgaaaaacgcaacttgggtggaggtttaagatgctaatgaggcacgtgatgtatggacaagcatggacagctactgcatgtgcacccagagggccacccagaatgtgcgtaccagcaacacctctcccacccccgcccgaagagtggtgtggggcccccagagctagagcctccctcgggcggtcctggctgactcactctccatcagccgcgctgactcgtctttcagagtgtacttttgcttttgcatttagtttgcagagggttctttctctgttgcaataaactgctttctacttctgtgtgtctctttaaattcttaactgctttctactgctgtgtgtctctttaaattcttttaaactaagaagacaagaaccgaaggctctcagttgccatcaacaatgggagcagctaaacacgacccaggcaagacctcccgtccatcgggttaaacccgtagtccactgctgactccacaactctgcccttgttcttacaccaaagctccctgcagagagcccatgggtgacatgaagctggcctcggacaccacatcttctggcttccctggcctctggccctgttgtttcctggaccttggccacggctgaagttcaggctcctcgtgataacaggctgctgatggcttctgatgaatgaaaacccgggcaaagacggtgcttctcctccctcctggccccttgcatgttagggaaatttgagtagcacaaagagagatggtctccctgagggtcttcacaaggccccatccaagtatctccaggatgtgggcagctctctgagcacacggaggtccttgcgacggccgcacacatggtgggggatgaaaaacgtttctttctctgggaatcctggggtgggaacctcacctagtggctaggcggacacacagcacagggtggattcaggcccgcctcaccctatgagagaggaggggcccctctcaggaacactggaggtggttgattgcgaccaaaggctctgccgtggggactaattcccacccttggaattcagtagacttttctgttgttggatccccagaaagccccaaatcaagtttgaatttctctatggaagactgtggcacctggaaccacagagcacgttccccgtgacatgggatgtgacactgcttatcagaagccgcctgggtcttcgggacagagtctactttaatgtaaactggaacccagggaaggtaaactgagacacagccctgcgtgttgacttcagggtggttggagagttctatggagaggaaggaacgtggtgagtggtggagacaggattcagggcgccattctgaaggaccggccttcagcaggggactccgtattctggtttccggtctatttacagcatctctctctctctctctcgctttctctcccctttcctgccacactttgatccattctcgtaaagcaggagagagactccttggtttatagccactgtctaaacattgcgatgctttctatgtgagcatggcagtcactctgtttctatctttaatactgtaactgctcatcggtttagctcttctctaccaattggagaaatgcacaagattcagggagatcatttgtgagaaaaggcatcgctgttcttcaagcccccatcttcaaagcaaacatctctctggcagaacccaagaaaaattccagttgggttttcaagagctaattaagccactgcacggcttcatgcgaaacccttctccctccccatctccttctcagtttcttcaagattaggctgaggttggaaagcaaacccgaaagcatctccaaccgcgttatttctgggctgtgttgatgcatgaagccacatctggctcaggatggagactcagggtctgggcaagttgacaaatccaaaggcacctgctgtcgagcgaggactgaagccaccgctgacactgtgcccagcaaaaccagcacacacggactattaactggtcgactttgctcctgggggcgtggaaggcagaatcaaagtgaataatgtaagcattccccaggcagggccggcacaccctgctctgggaaaataaaaataaatgttgatgctggtggattgtaaaatcccctaccacttccgttattccatcctgtgcttttgagtcgaacacattaagctcaccaggggagactggctctgacatagcgctgtgtccctcttcctgaaacgaaagccgtctgtctgacgaggacattgaggacccgtaatttactacctctgctacaattctaaatgctcccccaccgcagggattgaaacgttcttcctataattatagtggaatcaaaagtctagccggctaatgcgtggagcttctgtgccagctatttataataggggcttctcagccaatatgttgtttttaatatgtcatctatatgacattgtcaggatcaacctgtccttattttctgtgtttctcccctaaaataatattattacttaaacatataaatatttgtgagactaaaaagaaaaagaaaaatacctgaaaatgtaaaacccagccaagcccggttgcctcttggttggccatggaaggattctttgggagggaggcccagggtggggtgttgctggctgcctgaggccaagggggctctctgggaaagcagtctccacactctgggcctgttagtccgggtccctgatgagaatggccttctctctttgggaaacactcctgctccctggtagtgtggcgtcaacggggagatgctacctagtgtggcccaagatgcgcttttgtccaactcatcccactcacagatccggctgtggtgcagcttcgtggctatctcacaggtcacagtgttattctggcatcggaatcccccagcgctgctatccaaattctctccaacagagaaggcggcaggcagtggctggtgctggagaagcctctaggtctgccaaagtctggttttggcagtcggggctgggggctcccccagcaagcagcagcgctgtccaacccattctggtccaaggacaagtggtgccttccttcttctgactcagacccccggctacctttccctttcgcctgcggaagcgacggggcgtgcatggcaaagctgccacggaacaggtgtggaggtgatggtgagtggcaaacctccgtgcccaagtgggacacagcttgtactttcttgaattgttgaatttgaaagcttgaagaagcctgcaggatccacaccaacacttttgttattttgcacatgagaacactgcagcttagaacgtcggggtgtcttgcccaagtggccccgctgggctgatggggtcccctgattgctaccacgtgttctttccaacacagcaacgctttctcgctacccagtctgttcagattgccctctaggaattggaaacggcccccagatgcatccatttcttctctttctgcataaagtgctgatcacagacactgaaagagtcgtttctattagagatgggaacgttggactgggtttaatgtggatgtttctacagcagaactaacagagcagcacctccccagtgccccctgcaaagcaccgcggtctgcgcacggctccgggaggtcacggccttccctttattggcaaacacaaagctggcagatgatacttaggagtcacatctctaagtccaccgtctttattctcttccctatttggatttctttttcagtattctgatcttagaatttgtactgaaaaagtgaaaaaaaattgaaaaccgttggattctccagatttcactggagctgatgataattatcacattcttaataccaaacttttacacttttacacaagttcttgagaagtcccaaattatgaaaacctctagaatagattggtgggagaataattgtctcaaccatccagaaatcagtttattgaattggttgatttgatgttagttgtcgtaattgatgactggtgccttctgaggagagaacaaaaaagaaaacagtgctttatcctcaaggcacctgtgggctaagaggagccagtaacacctggagctgtgatactagaaaaaggtaacatgagaggaatctgtaaagtgctatgaaaatccacaaaaggatgacaactgctagagagatggtaaaagggctccatggcaggtgcattgcacaggggaagtggatttcaaaatcatagaatgaatccaaccagatggaaaaaacaatcaggtcttggagacaagaataaacagggctctcctagggaatgatgggagttcagtttggatgaagcaaagtgtcattccagggggcatgaggccggcgtgcctgggagcccgggtaggctggactttgtcaagggaacaacagagaactggagactcccggccctggagcgaccttccaaggtcatccagcctgaccctctcccagggtcatctgacctgaccctctcccagctgcgtccatcccgtctcacaccttcctagccatggtcctgggcaaatgattcccctagccacttacacacccatttctgctcagctgtagcaaaatcagtcagattaaaaaataagttttcaatacaagtgccttcgaggtcatgatgtgcttatgtactttatcaaaatgtgtatcacctactcctagtccaactgcagtacacacgtctttccatatccacgcacagcatatccttcgctaagatgctgctgatgcaaatacacatcactctgcactgtaggccctgtggggctaacaatggcatcccacgaaatcgctgaaaatgtcaaattaacagaactttatacttagcaaaatgaaaattggcaactcaaaaccatgactaactcaaaataacaagggctcttcccctgactgcaggaattctgggagccctttcacagccagaacttactgtaaatgcataatttcagtctttattaactcaagaacaccaatttttagcaaattttatgactcatgtagtgtaacgtgtaaatgatcattagatgtaaaaatagataaaaatctatggcatcaatttcctgtaagaaccagagaaaagagaacctataaaaacacctcctggccaggggcggtggctcacgcctataatcccagcactttgggaggctaatcccagcactttgggaggctgaggcgggtggatcacaaagtcaggagatcgagaccatcctggctaacacggtgaaaccccgtctctactaaaaatacaaaaattagccgggcatggtggcaggtgcctgtagtctcagctattcgggaggctgaggcaggagaatggcgtgaacccgggaggcggagcttgcagtgagccaagatggcgccactgcactccagcctgggcaacagagtgagactccgtctaaaaaaaacaaaaacaaacccaaaaaacacctcccatttcttaacagcctggcaacctactggaatgatcccacaggggtggttttttcaacctcaaaagaatggaaactcacgattccacaaaggatttcattccgcagaacactccagagaggttttcttctgttagtaccagcattctccttgtaaaaccttcccaccgttctccttctgaagctccacagagcaagtagaactctgtctccgtgtgtccactatgggacggcagctaattgcccttcttcagttttatttggtggggggccgggagtaaaactaagagcagacctttgtacaatttttttttttttgagatggagtttcgctcttgttgcccaggctggagtgcaatggcgaggtctcggcttaccgcaacctctgcctcccaggttcaagcgcttctcctgcctcagccttgtgggtggctgggattacaggcatacgccaccatgcctggctaatttttttgtatttttagtaaagacagtgtttctccatgttggtcaggctggtcttgaactcctgacctcaggtgatcctcccgccttggcctcccaaagtgctgggattataggcatgagccaccatgcctggcctgtataatttcttgttaaactttatgttgcttagttgcttatattattgtaatttggtgaaatacttttgcatcctaattctgatatttgctactttatgtgtgcttcccaggtccctgtgccttcacgaatttatggccgtgtacacatgttagacattgaataacacaggaccaaggagagaaccttgtctcaccctccacatcccccttcctatgaacagcggtctctgggtaccgtcatttgaccaaaaaagtactttaatttttggttgtggtcatttaactacttacacatcaagtttatttatgctataattcaatccacactataccatcttgccctcagaggagaccctaaagtctaagagttcaacaagcacattgagcctctactgagtgccagtgagacggctgagatgagagggacgtggcacccacacgagaagggcttgtcttgctgcttctttacagcaaactcatgttgatgctaagcacaatggccgtgtgtagggtctcaggaggaggtgctatggctgtggcatcacccagggaatacttttctccagctgaccatgcatgaggggcaagggtggccacaggaggaactgcccaagcagagaccaagggccatgcggctcaggggtcagccaggtgtgacgagctctgtgccataggggcgagggccacgcggctcaggggtcagccaggtgtgaggaggtctgggccataggggcgagtgccatgcggctcggggttcagccaggtgtgacgagctctggaccgtgggggtgtacccaagtggacaccgggccaggagagtcttcctcaccatgctggggacttggaggtatgctgggagaaggaccagttagaggagagaaatgtcatgccttcaagaaagatggtggccatggcccagcagcctcctggtctcacaatctagaaacatctgaaaaggaaatcggtccggcacaacctcttgatcgctctgtgcaatcactttttgcctgtgttaagtattaataagtgatttattgagtaattttagcgatgggagggccctgcctggggatctgcagggtgggggcagggccacgctcctcacactgacttgaggaggcatgaacagggcaggagagggctcccacacacagcaggagtgtcgggtgccatcaggtggctgtcaggcagccgtcacactgtctctctacggtaatagttggtcacagccggcaccaggaaaaagcatctcccaatagatagaaatgcttgggactggtgatcagcagcttcccgataggatctcaggaactgggctagtgggctcaggcgtgcacatgtggacagcccactccaagcgaagaatcatgggggaaggaacgtggggccctggaagcatgacaatggataaaaccccaagtcacaggtcaaaccacgcacccgtcctttggaagaggcttgggcctcttccaaatatactttccttcccctcatttctgctctgaagattttaaataaactctcactcctgctctaaaacttgcctcggtctcttcttctgccttatgcccctcaggcgaattctttcttctgaggaggcaagaattgaggttgcctgccacagaccctaatggatacaaatttgctgctgggatgattggatatattttgttgttgttgttgttgttttgttttgtttttttttcctgacagggcctcactctgttgctcgggctggagtgcagtggtgtgatgtctcactgaaaccttcacttcccgggctcaagggattctcctgcctcagcctcctgagaagctgggactacagacgtgccaccacccttggctaattgttttggtattttttgtagagatgggggtctcaccatgttacctaggctgctcttgaattcctgggctcaagctatccacctgccttggcctcccaaagtgttgggattacaggcatgagctactgcacctggcctcggatctgcattttaaagagtcactctgtccccagagccacagctgtctatagaggtctatagacattagggaaatttattggactcatggactggaaatctgggataaggagagaagggtttttgggcaatttgggtggcttctggggtgttcaccaggatggaaagtgtaagaagagaacaaacctttgtggtggggacaggtgtcaagttccaccctagagctgaagcgtggccgattacggaggagcccttggcaggggaccgggtagtttctagtgcaggagatgtgcctttccttgctgagcccccggatcacgggggagcccttgacagggggctgggtagtttctagtgcaggagacatgcctttccttgctgagcccccatcccactgagcacctgctcttcggttgctggcatcctctccactttgtgtgaatgtctcaggcttgattcctgcatggccttcgcgtgtatctcacagtacacgtcacatctgtaaattaaaaggcatcttctccatggacaccctgctccttcctcctgagctcccagcatccttgtgtaaattccagggaaatcgagggtaaaactcgttcccggccctctgggacggcatggccctggggagggtgagaggacaccagctgcagtttggggatgagcttccatgatggaaatgtctgggacacacggagctcagagcaggggcagcccggtctacattgggggtcagtgggtcttcagaaagactgatggacacacaggcctcttctgcgggctaggaggagggggatgcatcccaggaggctggtggcacccaagcaggactgtgaactgagtgacacagccggagcggacgggcaaggcgatgctgtgtccacacacgcaaacatgacccaggccacctccgtgtcccaagcacctgggagaggctctcagcctccatttgctgagtgagactgtccgcccaccaggaggcagacccagttcacctgcacccaggatacaggggagagaatgcgtgggaatggatgagccccaggcagcgggtgggtcgactgggtggggcatccaagccttggggagatgagatttacgtgtgcaaagtcgggatggaaacgcctgtgtaagagtgctgagcaggactccgggaggaggcggcttcagaaaggcaaggatgctcgcaggactgcgtgtcacggggggtcacgcaccacacggctggaccgagcccggggcctcagtgaccgaggcggcggctgccggtcgtcctggagggagagctgcctgtgaatctattgcacagtgggtgggaccctggtctaatggtgccacgcccacggggacccccacgggccgctgctacagagcagcgggtgccagcaggtcaggcgctcaggaagaggtgaagagaaatcaacgcggcgtcgtcaagctcagtcagcaggaggacccccggggagggtccggcactcaggagcccccccggggcaggaggggcctcttcctcccagactgaagccagaggcaggtctcccgctgctgctctaggggcttaggtggttttgaataactactgtggagaaaggaaacttgaccgcaggctgggtttgacagtgtatctgcgcaccttttccccttgggcttcctggttggtttagtgatgagtctgtttcaggtgctgtgacgggaaggcaggggccttcactctcttgctttctgtccctgagcagcacattacccatcccgggccccagcggcctcctctgtggggaggggacagcaggggaggggcctggagtctccagagtcgtgctgtgcggacagggaaatccttgaaataccctcaggattgccccagatgaatttgaaaattggaagagaaggagacacacgtcaggaagacaaacaaaagatgtgacaccttgttttttcacctggcacattctggcatattttttaaagttcagccatttgagccagaccttattatgagaattctatgaacgcttgatgtgtgatggatattttgcataaatttggatggaactgaagtttgaagagagatagggctgcccaatggaaagaaaatgtggaaatcaattaccctttgcatggagccttatctcaggatgcaaaggccaccggcaatgaggagggaaatgcccccacaactggaggtaattgtgtgaattttctaggccacagaggatggtttcttcactacaaaacacgaacatttttgtttcaccgagtctagatggcagtcttttgtcttggagacagttaagtgttactgtgagaaaattctcagctgctttgaaaacagtgaaaactctttgcatttttaacaaaagaaatgcattttgaaggtgggaaattgtcactagtgattaaagagaaagctctgcagaagtaaaacatcctttgaaggggtgagagaaggagaaggagagaaaaaaggaagagagagagacagaaaaagagagtgggagggagagagaggcagagagagaaagggagagatgagggctgcaggaaggagcctggagtggagccaggggggcctgcctcaggtgggggccagtgtggaggtcgaggtccagcccagggtgcccaactgcaggtctctggcaagggcccttggcagggagaagccccaggccctgcagggcagagctgggctgagtgggaagaaggccacacctggggctcaggtggttgctttcagtgtcctgcgtggtgactgtgctcgtaaaagtccagttcttgggggataaattccaggctcctgaagacgcctgggctgcctgattgacagcccagaagctgaggcctgaacgcatctgccaggtggttattgctctgcttccatggaaacgcacacaggacgggggagctgaggtgaggttttaaagacagccttctttttataacttccctaccttatcctcttccatctgaccgccgtttccatggcaaccagatcagaaaggccatcggcctcacgaactctgatttgcacggtggatttgccaagtgccaggcaccgccatgcatccagggaggcagaggcgtccccgtgcatccaagtcacccgaggccagctggatggaaagggccaggaggttgcaggtgccacggccctctggggtgtggagggaactctaatttctgaacccagcctgggtgccacaagtgagggtggccgcatgatattcacatgctcgggaacactcctggcccacagggacttcctttcttaacaatcagagacacaagtgctgggctgcccacgggttccggatgctgaccttgtggcaaatcatgatgactctccccagatccccacctggcctacgatccaacccctagagcaccttcacagccacgcaagggcaccctcccactgcgcagcactgcctctcactcatggctgtgaaacttgggttgcccgatcctgcaaacgctggctttctcctctgacccatggctaacaccacttccttacaggagaagtgactgcactgatcagaagtgtggagtcctgataagattagtaagtaacgttgaggaaggcgctacaggtcggggagaacagttgttctgagagacggccaatcacaggcaactgctggcatgacatgctgttcccaaatacctcactccacaagtagccccagcagcatgaccttatctgcccatggccccctccagcatgaccctatacagcttccttccagccctgcttctttgcagacggccccttttctgctgtgctgcccattgctttcttgcaacgtatcttcgtgctttctctaataaatctgccttctttacccacgactgtcttggtaaattcttttaccacccgtgacaccagccccagccattgcacccacaacaacacggtgatgtgccagaagcaatgaaaagccatccatacatagataaaaatatggggaccaacatgaagcgtcagcctgtgcgcctctttccagacgataggcggggtgcttaattttcagagaatgccttcgtgactatttcccttagacataaatagagaccacagccacgtgttatttcatgctatgtttaaatctaacttgggacttctgtgggccacacatgtctttaacaatcctgtggcgggcaggtgcctccccagaacgcttctcacaggtgcactgggaggttccctcctgccctgacatgcatcccagggaagagcccctctgctggaggactaagagggtccatgtgggatcctgtgatgcccaggtaaactgtcccactgtgtgcctgtgcttgggttctctccctgtgaaaaacccgactgcagcaaacctccccgagcctttactgagctgtgagtgaggatctgggcctgcaaagccaaaggagacgccagtgctgccctaacaggcagagactccagtcatgggagctctgctgggcctttctagtcctagaacagtgtgcagtgtcttaggaagtacatagcattcaggcgtgatgttattctctttcatgtctcagtaaaactctgagctgcacagatgtgatggaagccctgggaacagcgtcacggacatcagagggggtgggtcttctgtgtctcaacctggcgttggcacacggcatggaggtttccatggctggatataagtagagtcatgagaatgcctctgtcatctgctctacacttccttagtatctccgtttaagtaacttagtaccctgggtccaactcttaaatttgttggggaaaatgtcctaaatctagacacagacattgttgtttgaaagagttcagcttctcaaaatgatgatgagcaccgtcactaactgctgaccatcaggagaatgtcaaaataaggaccctcagacgggagagcaccaaaacaaggaccctcagatgggagtgcgccaaaacaaggaccctcggacgggagagcaccaaaacaaggaccctcggacgggagagcaccaaaacaaggaccctcggacgggagagcgccaaaacaaggaccctcggacgggagagcgccaaaacaaggaccctcggatgggagagcgccaaaataaggacccttggacgggagagcaccaaaataaggaccttcggacgggagagcaccaaaataaggaccctccgacaggagtgccaaaataaggaccctcagatgggagagtgccaaaatgggaaccctcaggtgggagagaaccaagatggggacccttggaggaggaggggcctgcaaacagatgggtcttcaccaacgaatccaatagctggtagcaccctcccaaaaggtaagccagcagtctatggcataacagccaagaggggagtggggctgcagctgtcttgggcaggggcagcataggttgtgtatgtgtggccgcatctcagcctctcagctacagggtgacctctctgggtcaaccaggatcccagttagtagctgcagtacagagtccaattcttaaggcaggagttaggctgaaggctgggactccattcagagggactgtttggagtgaggaccgggggtacagaccagaacccaggcaaggcagcagccacgtggagcaggaagaagccctgatgtgtgacaggtttgctggggcccaggcagtagcagatcacccatgacacgtgaatgacaagttagggatagcagattcctttcagaccctcggcctcacacggcgggtttgtgtggcttcagggcccggacagcagaggctgggagatggagttttggtagagcagcttggagtagagtaggtaggatctcacagcctagcttttgattgaaaacctgtttctgagaggaacccaggacagcctgctgaggaaagcaggaaatccagagtcgggttctgcctcctaaaccatgggtggcatttgggcgtatggagggcagagccctatagggaggggagaggctgaagaggggtggcggctccaacatgtaactggtttccaccaataacaccaggccggaggtcaatttacttagttatttgagggattcattttactattgatttatgttgatcaaagctgagaacaatgatttacagggaagtgtatttgaaggacacacacttcattcatttgtcaagagaaggtttagcttctctcaatatcaagacaaaacatcgaaggactccgtgcttaagccaggttctttggggccctccatagacgtgctttactccatagacgtgctttactccattgcattttggattatgcacccaaatgacacacagaagagatggaaggagctgtctttaaaaactcaacaaactggaaatagaaataaatgctctcaatatgataaaaaccatatacaaaacaaaaaaaaacctacagcgaaaattgtactcaatggtaaaagacagaaagcttttcctctagaacaggacaaagagaaagatactttaccacttttatttaatacagtattggaaattttggccagagcaattaggcaagatgaaagaagtaaaaggcatcctacttggaaaaaaagaattaaaattatctgtttgcaggtgacctgatatcatatgtagaaaaactaaaagcattgttagaactaataaatgaattcaacaaagttgcagaatataaaatcaacacttaaaattagttgcatttctatgtacaaacaatgatcaatctgaaaaggaaattaagaaaaagttctggccgggcgtggtggctcacgcctgtaatcccagcactttgggaggccaaggcgggcgggtcactaggtcaggagattgagaccatcctggctaacatggtgaaaccccatctctactaaaaatacaaaaaattagctggccgtggtggctggcacctgtagtccccgctactcaggaggctgaggtaggagaatggtgtgaacctgggaggcggagcttgcagtgagctgagattgtgcccctgcactccaacctgggtgaaagagtgagtgagactctgtttcaaaaaaaaaaaagttccatttatggtctcatctaaaagaataaaatacttagggataaacttaaccaagaaggtaaaagccttggatactgaaaactacaaaacattgttgaaagaaataaaagacataaataaatggaaagacatcttatgattggaaggcttaatattattaagtggataacactacccagtgtaatccacagattcaatgtaatctctatcaacatcccaaggactttttttcagaaatagaaaaacccatcctaaaattcatggaatctcgaagggccttgaatggtcaaaataatctttaagaaaaggagaacaaagttggagaatcctgacttcacttcctgacttcaaaacgtactacaaagctacaaatcaaaacagagtggtgttagcataccacacacagaccaatgaaagagaacagagggctcagaaataaacctttgcatatgtagtcaaatgaattttgacaaaggtgctgcaactagtcaatgcagaaaggatagtcttttcaacaagtggtgctgggaaaactgaatattcacatgtaaaaaagagtgaagtaacaccagctgcaaaaacaaactcaaaattgatcaaagacctaaatatatgacctaaaactatagaactcgtagaaaagctcatcagggaaaagcctcatgacactgggtttggcactgatttcttggaatgacaccaaaagcataggtgatgaaagaagaagtagataaattctacttcacatttaaaagcttttattcctcaaaggacaccatcaagggagtgaaatagaaacccacagagtgggagaaaatatttgcaaatcatatatttgatgagagattaatatccagaatatacaaagaaatatgggctgggcacagtggctcacgcatcatcccagctgaagtgtgcggatcacgaggtcaggagttcaagaccagcctggccaacatggtgaaaccccatctctactaaaaatacaaaaattagctgggtatgggggcgggtgcctgtaatcccagctactcaggaggctgaggcaggagaatggcttgaacccaggaggtgaagtttgcagtgagctgagattgtgccactgcactccagcctggacgacagagtgagactccatctcaaaaaaaaaaaaaaagagaatagaaaagaaatacaagtcaacaacacttaacccatccaacttaaaaactggcaaaagatttgaagagagatttatccagagaaagtgtacacatggccactaaacatatgaaaagatgctcaacatgacaaattattagagaaataaaaatcaaaaccatgagagaccacttcatacccatgaggatggctattactaaaacacaccacaggaaatgtaattattggtgagaatgtggagaaactgaaacttgtaaattgccagtgtgaatataacgtggtgcagccacttgggaagaacagtatggcggttccttgggaaaagtaagcatgattcctaacttgcacttgtgggtatacgtcccagataattgaaagtggggctagaatggatattcaatacccatgtacacaatagcgttattcacaacagccaaaaggtagaaacaacccaagtgtccatcagtgcacgaatggatatccatacaatggactggaattctggtttgtgcataatggaggcattaggctaagtgagatgagccggccatgaaaggacaaatcctgtgtgattccacttgcatgagggactgagagttgtcaaattcgtagagaccaaaagcaaaatagaggttaccaggaggagaagtgggagttcgtgtttaatggggacagagtttcagtttggaagatgaaatggttctatgggtggatggtgaggtgttggcacaacactgagaaggtgcttaacatgatggaactgtacactaaaaagtggtaaattttgtattatgtgtattttaccacaaaaaagatgaaacacccacatacccagcaaagctgtctcacgatattcttgttgtctgcattggaatgcagtgaggatgacaacccttgtcaggactgcttatgtggacactcgtgcaggacccttcttccatctgtgttctaggtttctcgggggccatggacagacattgttccctatgaatagcaagttcacaaaactgtgaagctgtcaaaattttctttatacttgggctgcaaggaagccccatgctaaatttgtagctcaacttgtaaattgcccatgtatgtgttctaactttccagtgaaattatgtttttatttttcctgtttctggacatgattttatttcatttcctgtttagttacactaaaagcatcctagtaactgagttcaatgttcctgtacactgtgttgtgctaattattataactagagctttgaacctatggtaaacatttttatttctccttggtttccctttttttctaaaagtcccgtaagatttaaattgcagattcaaatgatgctaaaagtaaaagctgagaataatagtacatttcaaaatggcatatttcaacacgtttctgtttcaaacaaagtagttattttgttagtcatttttctgaacacgtgagctccaggtcttttgggatctaggaaaccccgttactgaaaccacactgttctaacggtgtaagaagtcacagaatcctgaacgacaactttacagttcgatggtaattccaagacaatggtacagtcgtttcgtcctagctatgcagatgttcacggaaaacaatacttagctccctagagagcgaatacttttcaagagcatttttttttccttgagaagaaacacagctctctgtggaaaagtcagaaatctctttgtcctttctatcccagagtattatttttctggtctttcagtggtgctctttacctgataatacccagaaagtcagtttgattattatgtgatgccaacaaaagtgtttgaaaatgacgaagcaactaatgatttagcatttacaggtttaaaaagacagcacctgcaggagagactgtaatacgacgttgtttagtcaagttagtgttgagcttgccataaccatttcaactttcaaagtatttacgaatcaacagtgctggaattatccctccagtttcaaatatgacacggaagtaacttaaatgaaaaattcctttcttattccgccatgcgccaggggatttttcttcccctgaatgaaagtgtcagcatctcatttattaacaatgcagatacacatcaaagccactattgaatctgtctctccccattgactttgccttcctatttctacaccctatacttcttgttcaacgaattgttcttgatgtgacgtcttcacaataagcccataagcacaactgaaacacaatttcctgctagcttcagtcaagatacattaatcctctcgatatttcccaggacaatactatctctcttctgcagactttatttctctcatttggctgagaaggagaaaaatccttgaaaattggtttgaaaagtggtgtgcaaaaacagtcagagctaaaatttcttgggcacacaattttctttaaatgctcgcatgttcatcatgcaccctcacgttaaacactcgcgtgtgagaaactgagaaggagaagttgccggacagctgagcgtccctgtgccgctgccaccccaggctgccgcccaccgctcaagctcagagctagagccctgtccacgctgtcgtcccttcctgtggctccaagtctgttctgtccaagtcacttctccatgaaaatgctgggtggaacgtaaggaatgggaagaagcttaagccattcctcttatagacctgggcaaccacatggcgtttattctccagaatattcatttgatggggacctctgggaaatgctatggcagctacactcattgcctttctgcataggtaggtgtgcatgcatgtatgcaggtgaggaggcacatgtgtaagtgcgtgtgtctgtgggtgtggaggtgtgtatgtaggcgtgcatataggtacatatacagggagggatggatgtaggtacaaatgcaggtacccatgtagacatccacctatgttggcatgcaggtgtgtatgtaggcacctatgtagatatgtatgtaggtacatatgtggctatgtaggtggatttgtaggtgcacttgtaggtaggtgtgcaggtatctatgcaggtaggtatggaaatgggtacagatgtaggtatgcatgtaggtatgtgtctatgtcggcattcaggtatgtatacaggtacatatataagtatgtaggtggatttgtaggtgcgcttgcaggaaggtacctatgtaggtatgtaggtggatttctatgtgcacttataggtaggtatgcatgtagatacctgtgtaggtatgtaggtggattagtaggtgcatttgtaggtagctatgcatgtagatacctatgtaggtatgtaggtggatctgtaggtgtacttggaggtaagtgtgcaggtaggtatttatgtaggtatgtaggtggatttgtaggtgtacttggaggtaggtacctatgtaggtatgcaggtagatatgtaggtgcacttgtgagcatgtgtgtacatatacagatgtgtaggtagatttgtaagtgcactaatagatagatctctacctaagaggcatggatataggtgcagatgcaggcagacatgtagacatgtacctatggcagcatgtggggggatatgtaggcaccacgcagctccgcacgcagcctgcatcaacaactctcacccgccagtctctggccgctgcccacttgcagtgggtgggggcagaagagtccaccaagcgtcccaggtctcgtcagcatagttgatgactctcctggtctgatccacaaggctgaaacactaacttgttcattgctgtcctgtcaccttgtcacaacacgtgccccggtgggatggaataataacgctccgtctatggcgaaggcttaggctttgcagaattgtttggggtgagaatgaggcagccctgatcccccatgttcattcctctgtctcacccaccttgagtgtttgaaaccagaaacgattctaattcagacttgcaatgtgattgtaatggacaaaatattggccttggcttggagtgttcaagttacgtccaatgagaaataaaatatatgactctccctctctcttctaacttcatcattggattccagcaattgaatgtttgtgaaggcttggcagggaattaaaatctatttcagctggcagaagctctgaggtgctgtatttctggcctatgtatggttgtattgaagggagaagatgcacagttcctagaggtgccacatcggctactcattcatctttgagttttgtggttgggccaattatctcaagctctactgtaaacctcgttagaggaaaaacacaatgaaaatgtgtgtgtgcatgtgtatgtgtgtggacgcctgtgtgtgtgtgtgtgtgtgtgtgtgtgtgtgtgtgttgttaagcacatctcagagatgctttctagatggcatctattccaggtttatctgtttgggagatgataaatagaattcttaattattgcattattctctctaaattccagatcattaatatattctacagaggtaactctagatggataattaagtaaatcatctggagagtcgaacaatatagacacaaagtctgcacatttcaggtggagctattaaaaacaccaaggtctttagggactggctgtgtctggccagagttaatcaagctaggtttataacagatttgctttggctgtatattaagcagttagggctgctttcatacaaatatattctactgtgtcttccttggactgtgttttattttcttatttttgacagaaatatgggtatacagacctcaagaaaaagcaggggtgcaaaagaaacgacggccagccatcagcatcagcctcagaactgagggtgaccagggttggtggggactgaccagagacaccatgactcattgctaccacatgggaaggtatccaggactgccagatatttcaggaggagccagaaatctcgatttactggtgtaagagagtcccacatttaaaatgcaagaggagtgaacgtcactggaattgagatagatgaagtacatgtaactggtttagggttggaagaggaaagaagagagaacacgcgaatctctgttctaagtctcccactcagacctcccacacagacctctgtgctctcagtgctcattgtgtgtgagaattatctgcaagaactctagaaagtcgtggagccctgggccccaccagagaggctcatcagctgcacgcgtgggtgccgtgggagcccggatgctggggaggccggatttcagccctgctccccttggccaaggccttggatagcaaacctggaaagtcaaaccaaatccatctacgactgggtgagactcaggtgaagggttgtcaagttatctggtgattctgatgcagcattagggttgggaaccccagtaacatttaaattacttgagctcttcagttgcaagttattgaaaacaagtgaaaacaaaaagactaaataaacattctccacacacacactcacacttctcgtaaacagaatttggcaagataagctcttgctggtctgggagctggacttctttatagctcttgaggggaaggagaggaggtgcctgctgctgagtggagaccctgtgggctcacccatgccctgccctgacctgctcccggccctgggttgtgggcgaagctatagcctcacacttcattttgggccaagggttaggtggggtaaataaaggtcatggaacatgacttgggatatctgacttattcctaaagtgtagttggaataaagcaggaagaaaagaatatagacatttgggaacggacatggtttagggaaaaagtttaggtattacaaaatgtgcaaaaagatgtttgttttgcaatttatgttttcaggctggtgtgaactaaatacagattgacagctctgaagaaccaagagtggtcagaaaaacaaaagtgtggtggtagctcttcacctactgggagttaaaaacacgtgccgcgggtgtgaggagagcttggcatgattccacagaggaggaagaaaaaaggaaacaaacaaacaaacaaacagatgaaagggaatttgttgaatttacaatgaattagagtctttccattgtactaatttaaaagttaatatatcagcttcaaatttttcataaattgtggtaatttccaagaaggtcatctacatgtttcttggtttgctttgagaaagcactcaatataaagaatccattccattactttttatgtattaaaatctctcttaagcatctgactatttcataatttataagctagtgtagacttttgaggcaagcattttctttgaaaagatacagacattatctcagatttggcaaagaaaaaaaaaaaggatgtacaaacatcctacagttggcactgccttttaaagcacatccaaaaatgacccacagcaaagtgacaatggtaatatttgctcacatcacatgagcaggtctgagtagccaatgacctgtgtctgggttgctggtgtgatgtattacagtttctacaatttgctgcaggcagaaatcttaattaaggcctttcctaaagagtgaccttcagggagggcattactgaattggtgtgaaaatagacaagtggccaaattgccctggtgggacggtggagaacttggatatctctctcccaccaaagaatgggctgtgctggatataggccaggctgcaggatcaatgatcaatgatcaatgagccctgcaccccatgaaatagcctaacactggggagacgtgaaagggaggacttttctttttggcgaatgcacgtccgctcctcacactggaatattctgcatctccctgcatgcatgtcttctctgtgaattctgggcctgcgcgagtctgagaagagcaatgctccctaacagcatacgtgtatctgtgtttcctcgggggaaaacgctcgcatatctgcggtccttgacgatatcgtctgacaggttttagaaggagatggtttcttcttggtcagcaaaccaggatgagatgggaacacattccgatctgatcagggagaccttatacagtgtttgccctcctttttgagagaaattggaaggcatcctccactaaggtgaagatggattgtgcagcttcagggggcacaggctcctggccgggtgccagcaagcgcgactgcgcacctcggatcagtgaggcttgcttctgccagatttctcgcggctgtgtgaagtattgcagccaaatgtctctcaatttgctcatttcttggccaaagttactccctgatacttaaactctaagacattgatcaacttctcatgcacttgtggaggcccacggatgcatctgaccttccctttcagcaaggcgtgaccgtgcctctctgggagcttctgcaccggatgcacctgaccttccctttcagcaaggcgtgacagtgcctctctgggagcttctgcaccggatgcacctgaccttccctttcagcaaggcgtgaccgtgcctttctgggagcttctgcaatcagggcagtggatctacccaagtcgtctggtcacagttctcagtatcctctgatctaacattttcctgtgagtccagaggaacaaataccttcacagccgccacttaatgtgttgcccattagtagcggatccgcaagtctcgagctttctgtttgcattagcggaagaaaaacaacaaagtcaatctcagagttttttaaaccactgggaaaactataaagatggcaaatgcttttgagtaacaattattaggcagaagacaccacggttatttcaacctgcctggtctttaggtaagacgaactctgaacttctcaaaccagcactttctgaagcctagaagaagaatatgtaaggaagaagagactccaacacaattgtatacaagaaatgctggatgagggatcctaataattagcatattaggatcaaacactcttgggtgtctctcttgggtgaaatatctggtgagcctgaatgagagggggtcaaaatactgtgggatatttaaattaaaatgtctccatacaccacatactttcatatcatgagggtctgtctaggcaagctgctgctacaggtgcacggacaacaaagacctcagccttgcagctgactgacaattttgtgataaacagaagcacacgttagctgtcaggtaagtgagcctgtgcaagatgctgtcatcagagaatacatgaaaaaccaggaggcccaggagaagaagcaacactaacaacggcctaggagaagaagcaagcctaacgccagcccctttagtggaaggcttcacccaggacttgccttgggaacttgccctggaggaagagtaggattccaccactcagaaaggcaataatgggatgataatagcaggcaatagtatactatagattatatggaaataataattaagaatagtaggttaaatgttaagataaccttatatctgaaagcacttaactgtttacaaggtaagttccaatatattaattcaaatgaccactgaaaaaatcctctgaggtttcttttactactgcttttaatttttattttaatttaattttgtttttctgagacagagtctcgctctgtggcccaggctggagtgcagtgagacaatcagggcttactgcaacctctgcctcctgggttcaaatgattctcctgcctcagcttccccagtagctgggattacaggtgtgtgccatcctgcccagctaatttttgtatttttagtagagatggggtttctccatgttgtccaggctggtcttgaactcctgacctcaagtgatctgctctctttggcttcccaaagtgctggaatcacccgcctgagccaagacagccagcctgctattgtttttttaaataagccgttaaatggctcacccaagacaatatacacatgaaagtaagaatccagagctgaacttggttctctgtttccaaggaccataccccagttgtctcatgaactacatacgtcagcagataggatgccatgtctaagccttacaggattaccatgctgaaggaagaggaccttgaagtccacatcatggcaggtgcttcatatctcttaggaacaatgaaaaagtaactggccagaggaaatgccttctgcagtcctcacaattttataatttctttttgtttatgtatttatttaattgttattattttttaagagacagactcttgctctgtggcccaggttgaagggcagtggcatgatcatggctcacacaagcctcaaccaggcttaagcaatcctcccacctcagcctcccaagtagttgggattacaggtgtaagccaccacacccggctaattgtttttattttttgtagagacagggttgtgccacgttgcccaggctggtctggaactcctgggctcaagcaatcctcccatcttggcctcctaaagtgctaggattacaggcatgagccaccgtgcctggcttattatttctttttaggaaccattttgaaaccttttatttaactggagttttacaatcttactgacacctagcatttgtgtgcctacagaatgttaagaaatcctgataactcaaaaaagcccattctttgtttcaccattttgtcagctctagagtcatcctgcctgacaattagcagggccaattcataaggagtcccaaaaccaacacacactgtttttgtggaaattaaaaatggaataaacaaagtcagatgtaatgagacccacagtctggagaaaatcctacccctagacttgacaatgagcctgccataacctacctttctttatgtttttgtgtatacatgctacccctcaacaaggcaaggagcttgtctgtagcaagatttcagaaaaaaagaaaaagaaatcagagtggaaagacctttctgtctccgctgttcatggctgagtgattcgcctctttgagttgtagtttctcctgttaaaaagtagataaatttcccttgcttgtctaactggattgttgtaaaaatcaaaggagataagacagcagaaagctacttctaatttgtaaattgctacaaaatgagagttattgttatgtatctctcttggcctttaatagttgttgataagatcatttttgtgatataagcatcactcatttgttctataactcttcattgagtttctgctttttgatttagggaactgagtagctggcaagacagggaagcatatagtttagtggcagaaggcagagtgaaccatcaataagtgaacaataagcgccacacagagaagtaaaactaagtaatgggatgagaatgagaatggctgggggaggggcttcagagatagggattgttatgtgttcaacggtgtcccacccagaaaatacatgttggtgtcctaacccatgggacctcaggatgtgactgtgtttggatattgggtcctagctcgttaagaggagaccccactgcggtagagtgggtccatggtccagtatgttggtgtccttatcaaagagagtcgtgagggaacacaggagagtaccacgtgacgctaaggcagagattgaaggagcaggaaggatcatcccctgcggccttcagagggagtgcagtcctgctgacaccttgattctggacttctggcttccagaactatgagaggatggatttcagttgctttaagagcccaggtttgcaggactttgtgttggcagccctagaaggctaataggtggtccaagaacacctgtctacaggtgcagcatttcacctgggactcgactaaggagggaggcagggatgcaagtcagggagtgtcccgggtgctgggggaccccggccttctgagtctcacaatcagaaggtgggcaagacagctggaggggagcaggtagggaaggaggtgggagacgaggccaggagggagagcagggctttgtagggggaggtgatgtgcttggacttcatgccaagtaccatgagaggcctgggagagctttaaacacaggtcgctgctgacacggagctcaggccttgatgccagcatctaatccccacgcacttgccgagcaaggccacacgaaatgctcccaagaaggactgtgactttaaaaccctaaaagggacaggtcacagcacatttttaaagtttgtgacatgacattttctgttgctattcaatagttgtaaaaatgcttcatcagaacttttaaagcatgcaacagccaccacctaatgtacacttcgattaagtcagtgaaattggctccagactcagaaatcaaatcaggattccaatttttggcaacatagtatctatcatagtattttatttttgctattggataatggaagtatttatgctatttataaagtattaggtggtgcaggttacagaaaaatttaaattcctaatttttaagtgctaatttgcagtcagtagctttgttccatctttttgtttatttctttgggtatatttttgtattaagtagatatagtttagtttcagaccatgatagattcaggtcacaataatgaatacataaagattcagaggataaaatagtggcaaattggtctgtttctctgtgtgctacaaagaatgaactaaggaatcagaaagtgcaagttcacacttgattcatggtcctcttgctgatctctccgaacctatttcctcaattaattaattctttccttaatttaccaagtgtttgtccattgttcagtgctgagaggaccatactataagactggtgtgatcctgtctttaatgtgcaaagtagagatggaatccaagcattattattctaggcacagcataatatggcattctttttttttttttttttttttttttttttttttttttttttttttttgagatagggtctcgctctttcacccaggctggagtgcaatggcacgatctcagctcactgcaacctccgcctcctgggttgaagcggttctcccgcctcagcctcctgagctgggattacaggcgtgcgccactacgcctggctattttttgtatttttagtagagatggggtttctccatgttgtccaggctggtcttcaactcctgaccttgtgatccacctgcctcggcctcccaaagtgctgggattacatgtgagccaccgcacctggcccataatagggcattcttatgccaagtatagtacctggtttacaagagaccagaatgatccatttgcatggtttcttactcaggacgctaattttaggtattcaatagaaaatttagcaaaatcacacacaggaataaatgttaagtatattttcctccattttttctcctataaatagactttaaaattatgaaggaatgagcccatagacaatatccatgtctcctgagaggcagctttgggtctgaggtcaatcaactacttttgattgaatagtgtcctgtctggatttctgttctttatttactttgaaatatgtaaatatttgcatagatggtaaatggaaatggtgtacttgttggtgaacctgtttgattactaaagccataataataacaccaccagctatgaatgctaagcaaaaatgaccctttgttctactttttcaaatctgtggactacaacagcactcttggggacaataacccacacaatagattaaaagcctgttaaatgttattttcagcttggcagaacatcaactgctgagtaccctttagctccactttttttttgaagtatggcaaacttactatatccaggtgacaacagtaacatgtcattttagagtgattaaataattgtacaaataaatggaattaggcttactctctgactccgaaatacaaaattcaggtggagccaaggggtgagttgtgggggtctttgacctcccaaacgtttaccatgtgctccaaacctccctccacaaatgtataatctagtagaagtacacctggtggattattgcagcttcaggatgaaccatcacccattctccaaactacagtctctcctactttgaaaatctggagctatctcttgctaaaaacataaaagatttaaagatttttctaggttttctctttttttctactttaaattctcaaccaaaacagaggcataatttatatatatgttttagtaggaagtcttggattatctcctaattttaaatagtttgattctggttaaaataatttttagaccacagtttacatgatttagctgattggaaaattgctttttatcataattagtagaaattggtgaactgaactcctttaagtctgctacaaaaccaaccttgcaagaatatttcttccattaaagcacatggctttaagagaattgccaataaaaagcaaccagttagaagattcatgctggaggaaacattcaagttgtatatcaaatacatgcaaggtatatcaagtagttcacgttcacatttatttacaaaactcctcggagggtttctgctgtgctaaggacaaaaggagatctcataagttctgaatttaataaaaaatatcatagaggttattttgccaaatgaaaataaatccaatacaacactactatgcaatgggtttaaacatttatacccaggttgatgaatagaattccagcccaatgctacattttggcagaacatagtcttagaaaagatttggagctgcctccagtctttaaggtggtaagctttagaggagccttagaaatattccattccattagttagaatatgatgaaaagtacaaacttttctagtcatcatggttgtcattattaacatgattgtcaccatacttattaatataatcatcaccatcatcatagtcatcatcaccatcatcatcatcattatcattgttatcatcatcatcattggtataaacatcatcaccatcatcatcactgtcatcatcaccaccattatcattgtcatcaacattaccatcatcttcatcaccatcattattatcataatcaccttcattagtatcaacattatcaccaccatcatcatcattgtcatcaccatcaccatcattattgtgatcatcaccatcattgccatgattatcatttctattgtcatcatcatagtcatcatcatcaccatcattagtatcaacctcatcactgacatcattatcttcatcatcaccatcactattatcatcgtcatcaccatcatcatcgtcatcaccatcatcatcattatcgttatcttagtcatcataatcaccatcattattaacataatcatcaccatcatcatcatagtcatcatcaccataataagtatcaacatcatcactatcatcatcattgtcattatcaccatcatcattgtcatcagcaccatcatcatcaactttatcatcatcatagtcaccatcatcagtatcaacatcatcattagtatcaacatcgtcacctccattatcatcattgtcatcagcaccaccatcatcgtcatcatcaccatcattattaccaacattatcatcctatcttcatcatcatttagtatcaacattatcattagtatcaacattatcaccaccatcatcatcattgtcatcaccatcaccatatcattgtcatgatcaccaacatcaccatgatcttcattgctatcatcatcatcatagtcatcatcataaccatcattagtgtcaacattgatgatactaatcaatctaccattatcatcatttcatcatcatcatcatcatcgtatggttatcataataatcatattcatcataatcaccatcattatcaacttaattatcatcaccattgtcatcatcaccataattagcatcaacataatcactgttatcatcattgtcattatcaccagcatcatcatcaccgtcatcatcatcatcaccaacattgtcatcattatcattatgtaacttaactttcctcatacggagagcaacgcacactgggctatgaacaatagggaaattactgtgtactttggcttcttaggctgagacattaagtagaaacaaccacatattaagaggtcttagatacatatttatagcaccatgacccagtggtaaggacctggaatgcagactcagaggaccttagtccagccctgcctctagctggacctgtgacagtgacagtgaccctgtcactggcttttgaatctcaggtatgccccttaagttctataagcctaagtcgtcacatcaatgaaatgggataataataataacacttgactaagaagttattgtgaatgtcacacaatatccttactaacatcttcattttgcaaggagaaaaccaagcttatgaagattaagtaatgtatacaaggaagcacaggtgttaactgatggagtctgagtatgaactagggtctttttgattagacaattcgtgccccaaaccacttgtatatactgccttcatcatatgaaatattgcacatttaatagtgttcctctccatttttagagactcaccaaaaatttctaaataagtttgtggaaatatgcagaaaacacatgttcatttgagacaaattttagagaaagagctttttgaaataaaggctaatttagaaaccattttctaattcatcagttcctctcagttgtattaaacacttattgttctcctttctcttataaataattgattcaaaactatttataaattacatatatatgtacacacacacaggcacaagcatcagttatgctttttatacactaatcctaaatctcttcaatctgaaattatatttcataaagaacttgttctgaggaaataaaattatatataaatgtcacttctattttccaatcatttataagttaattgaggggatctcacatacattcctgagatatctgcagaagtaaccactttaagtataaattccatagaatttgaagggggtggagtttaatgttggttgatgaggtggagatgacttcctggagggcatggaagttgaggcatggaagagaatgtgtctgggtgggatgggagagaataactcagttttagaggtagagaaaatgaacatttctgggtggcaaagataaaaaaatctcattaaatcaaatatttgtgtgtatatggaaaagcagaaactctcattcagtgcttgtggtggtataagtcagtagatgccttggaaaactgtttgggctgggcatggtggctcacgcttgtaatcccggcactttgggaggctgaggcaggtggatcacctggggtcaggagttcgaagaccaacctggccaacatggtgaaacccatttttactaaaaatataaaaaattggccaggcatggtggcagatgcctgtaatcccagctactttgggaggctgaggctggagaatcacttgaacccaggaggcagaggttgcagtaagccaagattacaccattgcactccagcctaggcaacaagagtgaaactctgtctcaaataaataaataaataaataaataaataaataagtaatttttttaaaaacaaaggaaaagaaaagaaaactatttggagtgatctcatatgtgtgaaaatacacatggcctatgaccaggtaatctcactgatacatttataaacaagagaaattcctaggatacaaaaaaaaattactgtttataaaaaccaaaagtggaaatcatccatctatgttagaatgaataattttatgtgttcaaaattttaatgtgttcaaaatataataaacatgacacatgcagtaacatggatgaatttcaccaatacaatggtgaatgaaagacgtaaaacacaagttacagacatatacttttgtataaatttcagaaatgaccaaaatcaaaaaatgttgtttagaaatacatcactgactcatcacttactcatcattcattcattattcactcatcactcactcattattcacctcttactcactcatcatttatcattcagtcattactcattcatcactcaacactcactcatcactcaacactcattcatcattcatcgctcactcattactcatttattactcatcattcagtgttcattcatcgctcactaatcactcactcaatactcattactcaacactcattcattactcatcattcactcattactcgtcattcactcattactcttcattaatcattcagtcattactcactcatcactcactcatccctcaacacttattcatcactcatcactcactcattactcatttattactcatcattcatcattcactcatcactaatcacttatcattacttaacactcattcattactcatcattcgctcattactcatgcatcattcatcattcctcactgctcactcacactcacttatcactcaacattcattcattactcatcacgcattcattactcactgaattaaccattcagtcattactcactcattactcatcactcacttattacttacccatgtatcagtcattactcattcatcactcactcaacactctattacttattactcactaatcgctcactcattactcactcatcattcagttgtcagctactcatcactcacctatcactcactcattactcactcaaacttattcatcactcgctcatgtctcactcatcactcatcactcactcatcattcatcacccaccactcatttttactcaacactcactcatcattcaccactcaccactcattcatcacccaccactcactcattactcgtcactcacccattagccatcattcactcattactcactcataattcattcatcactcatatgcatcactcactgctcactcatcactcacttattacttgttactcactcattactcactcatcatcattcccttgttactcacacatcactcactcatcacttaacactcattcattactcattgctcactcatcattcatcatttagtcattactcacttatctctcatcactcattcattactcatcactcactcaacactcagtcaccaatataggtacctctctgactacatgaagaagtgattttgatatcttttaacccttaatcagctataaaatggtagcccacaggttgcatatgaactgcacaacgtattttattaggtatcacttgctttgtgaattttttgtatagttctacacagaaaagctagattcaagagttcttttgaagagttggagttgtttgtcaggcctgggtccctgcttctgagcagtgcctcccactgaacccagcacggaagtgccctgttcccatcatcccacccgtgttcttgtttaggcacttaccgtctcaccccatgtgtaatgacctgtctgttctctgttgttatttcagttttctccctgaactctaaggacatttaacctaagtgttacatgaatcaaagtgctggtgtgtttttctctgtctttggaaagttatagaaggtagaatcggcatgactttgaagcaattattccagtagaaattctgttttcatagctgccaaaaaggccgcatgacaaaaacagtggcaattcccaaatgcatcttgatacttctaggttgattctaaatgacaacttatttactaacataaaataataatttagtcaattatatttttagttcttcataaacacctacagcacaaaagggtaaaaataattttggggtgaattgtagcaaagaaaattttgattagggcgataaaagagaggtaaaatagatacacagcaaaaacatttaatcttgcccagctgttataggtgggctgcatatttagacaggagcttcctagctgccaatgcaaggaaattattctgacctttgcaagattcacaacaatcatgggataaaaacaaaacacttgttctggaaaagcactgttgtgctgtccctgaaacctagagtcatattctctagtgcaccttttaaaattttactttatttttatttttgagaaagagtcttgctctgtctcccagcctggagtgcagaagcccaatctgtgctcactgcaacctccatctcccaggttcaagcgattctcctgccttagcctcccaagtagatgggattacagacatgcaccaccacgcccagctaatttttgtatttttagtagagacggggtttcatcatgttggtcaggctggtcttgaacttctgacctcgtgatctgcctgcctcagcctcccaaagtgctgggattataggcgtgagtcaccacgcctggcctctagtgtacctttttaaagaagtgatgggtagtgtgtttgggcagcttaaacattcctgcagtaaaagggggagtttaacttgctagctatgtagggaaacagttttgagtctcctggaattgtacacagaatttggtgtgcatgtatacatgatttttctagagttaaatatccagaactttctccgatttctcaaaggcagcattctcctcaatgtgccacacagcccagttgtatcagaagccctcagggagtttggtaaattgcagagtactgggccctacatgaatcagagtcactggaggtggaactcaagaatctgcattagaatggctctttctctctcttcccccacaacatgtacacaaaccaattcatgtgtctgtttattaccattatctttaattcaattaaaaatgaaaaatagcaaaaatcaatttagcagaaagcaattccacagaggggcccaatcaaaacagctcgaatatattgctcgccagtagcctgttttgatccaagggtaaaatgtaaactagccaggggaatttatggacttcatgtccttcagccaatcctccataaatatcatttctccccactgggcatttcaggaggattagaaaacagaattctttttttattcactgacaagaacctggagggcagaaattcagtgtttcaactaaggacaaagccatttgattcattaatcaactgggcagaggacaggattaaggttttattctcttctttcgaagaactctgcctggctgaagggtcaccactgcacccggtaccaaagcaggtccatggatgttacctgtgggaatagcctggtgagatctgcaataaaaactgcaatcgtgaggaaacttccagaacattgaggctgatcactgaccaccaggtaaactggcaaggaaggatgccacacagtgtccacctgggtgccatcaagaacggacacaatagctgttgctttcacagcgaaaggagacttctcgttcaccagcctcagtgggggcccggcccctcctgcacctgctgcccccagcggggctctgtgatgctgcatctcccacaactgtccagccagtcatgctgaagaccccttacttcctggagcatttctaattttaagttttgtgcacccacaccaggaaagaaggtttagttctatactctggagaggtatatgaccgtgtgctcacaggcagacccacacatccttggtctctcaaaagcaataaaaggtgcttttgcaaactataggcctccttcaaaatcctgagattcccagcaaggttttgggtcacccctcccaggcttgaatcagtgacacggcaacccatggaagaagcaaatctactaaatttacttgtgtttgaagaggagttaagctgcaataaaggaactgtcacccgcttgcaggggcctcagtcctgcctctgtcagggcctctggcctgtggacggaagtctgagtgggtgtcactcgggtgcatgagctgggcctcagggtgaagtccaggttgtgtagtttaaaacatccattttctaacctgtgttactttaatctttatttgttttctcacaacacttagatggaaaaagaaacgggatcatgttgtctggttattgcattaaaaatctttaagcatgcaagaaagaattatttttcaataaattttggtaagatgtctgcatttcagagagatcttggtaatagcatgagcatatggtgccatttattttctgtcaccatcttattcatttccttattttttgcggcaatctagcatattatcttaattatgttttaaataacttttggagaaagcattaaggaatagcaatgagattaaccctaaacacacgtatcatatgcacatccaaggaaaaatctaaaagaatacagcagctatctccactatttagagctttactcagtaaattattttcctcaaaataacacatacatatttaatttttaggaagagaaccatggattatgcaatatcaggctttcgtgaagggatttttttgttgttgttgttcagtctgtagcccaggctggagtgcagctcatttcaacgtctgcctcccaggctcaagcaatcctcctggctcagcttcctgagtagctaggaaaacaggcacacgccaccatacccagctattttttttttttttttagagatggggttttgccatgttgcccaggctggtctcatacttctggtctccagagacctccttgtgcccccaaagaccttgataagtcacagggaagcacaaaagcagtcaattccctttcagccccccttttagcacctgtgagcccttcacattcattgtatcatttcctttatacagcacgatatagatcttggtcagcaaatattttccataaagggccgtgatatggttctgatctgtgtccccatccacatctcatgttaaaatgtaatcctcagtgttagaggtggggcttggtgggaggtgactggatcatgtaggcggatttctcatgaatggtttagcaccatcctcttggtgctgacctcgtgatagtaagtgagctctggctagatgtggtctctaacagtgtagccctgcccacgccccgcccccttgctcctactctgccatgtgacatgcctgccctgtcttcaccttctgccatgattggaagcttcctgaggcctccccagaagtcaagcagatgccagcttcacgcttcttgtacagcctgcagaaccgtgagccatttaaacctcttttctttatacatggcccaatctcaggtatttcttgatagcaatgcaagaatggcttaatacaggccagagagtaggagtttttgatcattcagcctctttcccaatccttcactctgccagtatttcatgaagcaggcacaaatgacatggaagtggcatgttcagtgaacttggattccgttgcttaaactggctccttcacttccatgctgaggtcctggatctgcagctccaaccccctttaaatccctcaacacggagcccatcgcttccagcagcagctctcacactgtgagcgggcatgctctgtcccaggcaacacttgcacacctttcttcacagcccacaagccagtcctactgttttctcccatgaagccaacactttcatttttccaacactcagcccaccccttactttttcccctctttaatgggaaataatgcatctggcgctggacattctgagtgtgtctgagtacacgtctcattgcagacacgtgtgtacgcgggcattatgtagccagcccggccctgttagggagttctgctgcagacccctgactcggctggctgtgcactgcgtggagccccacgtgcgtgggcctggacgttcacatggagctcctgccgtggtggtgaaatattgtggactgcttggctgactacacgggtcagttgctgcaaaaagccagtctgcaggtggggcagtccaggaccgtttccgtgacaaaaggagaaaaacaatgaccttgaagtaaaatttgtataaagctacatttttttcaatatttaaaaaattcttaaaaagtattcttactattcattttttgctattaatatacaagggggtagttgttgccggcttcatgctgtgcctggcactcttttttgaaattactctggactgaaatccctgaatctgggacccaggttctaggaatgcaaacacacacacatgcgtgtgcgtgcacacacacgtacatatacacagagacacacatgacacacacagacacacatacacatgcaatgcacacacatgcacacatgatgcacaaacacacagacacagccacacatgcacgacacacagacacatgcatacagacacacacggatgcacacaggacacacacacacatgcacacacagacacacacaacatagacatgcacacatacagacacactgatacacgcaaaacacacatgaacacaaacacacaggcaccgacacacacacagagacacacatgcacacacagaaacacacacaccaatgacaaatcagcctcactgtgtgcctcgcattgccccatttaacccgcatcctgcgttgttggaaagtgtgtatgtgatgatgacgctgaggaagatgacagcacagagggaagatggcacctgcaagggatcggagggtttttgttttttttttttttgcaacaaataactcagatgccagttttcctttccagggaagttttatggttgagttagctgtcttagggaggcgaaatgatttctctaaggtgtcgtctgactcacatccacacacatcttccctcggaaaacactcgttctgcctgaattgaaaccagtgtgtctagccctgagccagttagcctcaccatgccccagccaggcgcgtcagccgcctccccacacctgtggttatgccactcccatccccaccatggcagccacctccccatgcccgtggttctgccacttccgtccccaccgtggcagccgcctccccatgcccgtggttctgccactcccgtccccaccatggcagccgcctccccatgcccgtggttctgccactcccgtccccaccgtctgcactccagacatcttcttgaattaggaggactccaagccagaagctccatcgtgttctatttctgtgtgagtgagtgcatgacatctcacaaaaaagtaataaataatctttcaatgtatccttttccttgactttttccattcttggtatcaaaatcagagcacactttaataatcatctaatcgtttctggttgtttctcttaaaatctgatcatctatgatctgattattattttatctgataatctattatcagattttaagagaaacagtgcatgtgactgtgtctttgggaagatgatgtgcatgtcacctattggactttttactgtctgtcatgacggtcctttggaatggttttcaggtagaaatgaataatattatggtattggtcaggaagaaatttaacgacaactgaatttgtttataaaagtttgaattttgtcgtgcggctcatttcaacttctcctcctgcaacccttctgaaatagagaaattctgcccataatatttattatttatgggggggaaatgctggaatgcctaatggaagcttccagatgataaaagtcccaggtctagcaggaagcccacaggctgttcaattcccccactacggtatttgcatatttgaggctcatgttcccaagcaccagacaccagcaaaactctgcagcgcttttctgttagtttcagcgacagcctgtctaggcatgcccttctagaaagaaaactgtagtaatgctaagaacggtagctctatttactgaggaccatgtgggctccaggcgtcctgccgacccactgtgcagggtctcatgtggctgtccacacagccctgggagatggagattcctactctgttcatctcgtaaaagaggaaaattaaatgtaggggagaaacttgctataagtacccgctgtggactggctgtggggtcccccaaattcctatgttggtaccccaaccccaaagggatggcattaggaggtggagtctttgggaggtgattgggtcatgggggtggggcccggtgatgggatcagtgcccttctaaggaaaaacgtgagggccctggtttcgtccctctccgatccctgccgtgtgaggacgcagtgagcaggtggctggctgcaggtcggaggccaggatgtcaggaggcaggtcttccccacaatccggatctgctgcctggacagtgggctcccagcctgtggcactcagggaccaacgtccactgcctaagccacccagtctgtgccccgctgctatggctgcccaagacggtggccgagacagaagcacttctgagtcctagggtgttactcactgattcttccagtggctgtcgagtgacttccctataggagggcagagctgtgatcaataaatacggaagccaggaagacaggagttgacgctgctacagaggaaggaaacagagtgggctcagatgtgctggctgtagaagaggagctcgttttatgtgagggaacctcaggaggccctggagtcaggagggagcaagaccagacccactggagaggctggcatgagccttggcaccggacaggaaggctgcacctgcccccttcaccaggctgcatccggagctccctgctatccacacaccccagcttctgctcacactgcccttcaaggcccctcgtgagcacacatggcagtcccttctgagtgcttcctttactacgtgaatctgacgactgcctagagggaaacgtgagctccgtctggagatgtttaccctcgaccaggtggcagctttgaatggcagggactggaatctaccagtgtagctcctgtgtgggcaccggctcaggacgagagacaggccgagttccaatgtcttccaggactcgatggaggggcagggtgctgtctgaaggggtttcccccgcttgttgtgagtcctaagtgccagatagcgggtgtacagtgacttcattaggcatacgcagctttcctggcacgtacacggggagaactggaggagaagagctgggagcagccagccctcccagtcctggatttgaccatggtgcccttcttgccgtcttctccagggtgggacaggcagcgatggctcttccactggcctctgggtccttcagaactagtaacgtggtcagggctgttctttaattttagggatgtctggtccaaggttccacaattgacgactgtgtgaccttggggaaacctcacctttctaaatctcacaagggagatcacacaattcccgagtggtgcgttcatcaggaaggtcaagtgaggtcgcgtgtgaacgtgaattatccagcagcacacggccagcgagaccttgacactggtgttggcgttggatgaataggatgcgtttgagggccccttggtggttgagagccctcactgtcaccgacctccatccatccccaggacaggcatcttgcagaacctcaatggacgtcagtgctgtccccgcagctggtgaagacacacgctatggtcagaggctgcgtctggacctcggcttggccaagctatgtgtgagcatgaagcttgtttccttctctcaaacatggggagaacccagtaaacctgcctggcagagtcgttgggagactcccaggaggcccttggagtcacttgcctacattattgttttcacgctggcttctaaagaagtcgtgttagctgggcacagtggctcacgcctgtaatcccagcacttcgggagaccaaggccggctgattgtctgaggtcaggagttcgagaccagcccagccaacatggtgaaacccgtctccacagaaagtacaaaaattagccggatgtggtggtgggcacctgtatttccagctactcaggaggctgaggtgggagaatcgcttgaatccgggaggcggaggttgcagtgagatagctgagatcacaccactacactccagcctgggtgacagagcgagactccatctcaaaacaaataaagaaggaaagaagtcgtgcttattctgtcagtccctaagaaatcaaccttgattttagtagacattggaaggctgcagagctcctgaaagcccagccgtgaacccaggctctgcggaggcctttccttctcctctggcttcaggtgagaagtcgtctggcccagcggtccctgggcctcagcatgaaggctggggagctaagcgaggagtttggtgcctttcttgaagaggagtctatgaatagatcctattttgtagcatccgggaggagccggtccatctataaaaacctcgataatcgtgcctcgtttcctgctttcactgcgtgccatgccctcggtgattagcgtgtttttcagactaacagcaacagtatgttgaactgaatgccacctcctgggtaaaatgatcaatctctttgacttctgcagtaaacacgttccatcagggggtcactaatatgcttttatgacctcactgtcggagatgataccattaccaagcttgataaaccattcttcagaggcttgcttttaattttattttttatgcaatcatggggactataaccaataaatttagctcgatgctttctcactattaactaattctgaagaagccctcgggggttcgtcaggcacaaatccttcaaagaatttgtacaggatattggaaatgatattcacccggggacagaggtttaagcccgagctgctactgttttctttgccattagagttacaacttggctaaatgtcatttagtcaaaatgctggattctgcaggatttgcagataggcttgactatttgtctttaataaattcattgactcacagaagaggtattagattatttgtttgagaaaaggatgtgtaagtggcaccagactgctgatgtgcagtttctcattaggtccgtgcaggctcaaaagtgctcaaatccaaattaagctccagagcctttttggaaaacattgtaacagctgcgaaatggaaaggggaattcagatgagagcctggctagggatcttatcttaaaggggcatcagctaaagccatgtctgtggtacaaaaccatgggcctggctattttcttctttctttatgtcaaggagggagcttcttaaaattatgctttaatgcttgcattgcttctgaggttctgacgtcttaaaatcccatttgcttccctttctttttctctttctttcttttctttcttctttcttttttctctttctttcttttctctctcttctctctctctcactctttctttctttctctttctctctctctctcttttctttctttctctctttctttctttctttctttctttctttctttctttctttctttctttctttctttctttttctttctttctttttctttctttctttcaacaagatctcgctctgttgcccaggctggagtgcagtggcacaatctcggctcactgcagccttgagctcctgggcttaagtgattctcctgtctcagcttcatgagtagctggaatgacagctgcgtgccatgatattcagcaaattttttgacatttctttagagttggggtctcactatgttgcccaggcttgtctcgaactcctgagctcaagcaatcctccctcctcagcatcccaaagtgttgggatgacaagggtgagccactgtgcaggcaccagaagtgatttctggctgttgttttcaaccactgaggacacccattgccgaatgattattttcaaaccaaagctaaaatttgaaaggtgtcttaaactaactgtgggaatcatttcttggttgaatttcatatgcatacatctatctggagaccttggagatgaaggatagaatcaatgacaccttagagtcctttgtgattctattgtaattatcgtaattactgtgaatctcagactaatgactcccccaccccctacagtcccttcttcactggaatctagcccaaagccaggctagaacactgaaagcttttgccacaaaaccagtaatcatcaaataccattatagatggaactctcaattccaaagctctctctgtctctctctctttctttcttgacgctgtcacccaggctggagtgcactggaatgatcatggctcactgcagcctcaaccttctggctcgagtgatcctaccacctcagcctcctgagtagctgggactataggtgcatgctaccatgtccggctaattttttaaattatttcgtagagatggggttttgccacatgggccaggctggtcttgaactcctgggctcaagccttggcctcctaaaatgctgggattacagatgtggccaccgggcctggctcctgttctattgcttgttttgatccatttatttttgtgctgctggggtgggtgggcgtatcgggtggatgcacttataatattgttaaaagctaaggtgaagtgctatgttcaacggatagattatgtatcagaatgccttttttgttaaagcaatacatatttattgaacacctaccccatggtgggctttgatctcatgcctggaattcaacagtaaacagaaaagggggactctctttcttcaggtagctcctattccagtgaggggagacatgtgtgggatgtgccaaggggagagaagttacatggagaacagaaaagcaaagtcaacgaggtagggattcctgtggaatggggggtgggggcagtgtcaacatttgatgctacatctgtgagcccggtctgaaaggagtgaagaatcagccgaggaaggattggctgagcacacatatgagccattaatgccactacactggataccaagacatggagctgtctacactggataccaagatcttgatggtgtctacactggacaccaagacgtcgatactgtccacactagataccaagactttgatactgtctacactggataccaagacatggatgctgtctacattgcataccaagatgttaatgctgtctacactggacaccaagacgtcaatgctgtctacactggatactaagacatcgatgctgtctacattagataccaagactttgatactgtctacactggataccaagacatggatgctgtctacactggataccaagaagtttatgctgtctatactagataccaagactttgatgctgtctacattggatactaagacatggatgctgtctacattggataccaagaggtcaatgctgtctacactggatgtcaagacatggatgctgtctacactgtataccaagatgttgatgctgtctacactggacaccaagatgtcaatgctgtctacactggacaacaagacatcgatgctgtccacactagataccaagactttgatactgtctacactggataccaacatatggatggtgtctacactgcataccaaggtgttgatgctgtctacactggacaccaagacgttgatgcttctacactggatactaagatgtcaatgctgtctacactggataccaagacattgatgctgctatgctggataccaagatgctgatactgtctacactggataccaagatgctgatgctgctacactggataccaatacatcaattaagtctacactggataccaagactttgatgctgtctacactggataccaagatgggtgtttcacgttggccatctaatcctcaaagcaacagaatgaggtcagtatcatcatatgcatttcctagatgagaaggctgaagtccaaagagtggaagctatttccaaataaatccaagtctcatgacatggagaagagctgggatgcaaattcaagagcacatgattctgaagcaaattatttccctccaagtttctgctctcattgccagacaacaccttctcaggggtcatagcttcagccacaagcaaggtgtgtggacattggaagagttgtttgtcccccagggatgtggagcaggtgctcttacgtgtcccagtgagatgcaggagctgtgtgctgatcttgtcatgccagggacacatctggagtctgtgctgggctcaccccacgtctgccaccagcctttcgcacagcaggaaatcaacaacgacttggtaaagacaatgggctctgccaagctgcttactttaaagttcacctgacacatttacactcagggagagtgacgatgtctggagagcgaacgtgaagaatgaagactacagctgatgacattgcatactgaaaatctgccaagagagtagattctagtgctcctaccacatccacactgaatggtaactttggaaggtgatgggcatgttgatttgtttgactgtagtgttcatttcactatttgtatgtatatcaaaacatcgtgttgtacaccttagatatatacaataacagtaaataaaaaaattaccagaatgttcactagttccaagaaacctattttaatcttgagctgccagaaacccatagcccatacattaatgacaaagcgtaactagaaacgctccttgaagaccctcagtgacaaggctggctatgacgggatgaccgccaccatcaggcctgtttcctgaagccggcagcgccctgcagccgactctggcaggagggcactctggagtgtgtggctagcgatgacggccgtcctccgtggctcaggatcctcttcttgcctgtgtggagttcatggctctgttctggctctggtgctcccaccatggttctagccaggagtctctcatgatggagcgcgctgggaagggctactctggggtggaattatccagacacacggcagtgctggggttccagggcagccctgaggagaggggcaggggttctgcaacccctctgcccaggtgcatgctcagaagctcagcgcctgtgtggagggactcagtgtcaggaacaaccagggatttgctggagaaggagaagctctgggccggtagagttggatcacagctaatcatgctggcttgaagtgatagccggtgaatgcttgtctatcacctttctggcgcctcttactgttcaactctccattttctgagctctgtttaccctgttctatctaaaacacttaaatttgttctaaatgaagctgtgtataaacaaaataacaaaaatacagccgggggcaatggctcatgcttgtaatcccagcattgtgggatgctgaggcaggaggatcacttgagctcaggagttagagaccagtctgggcaacatagcgagaccctgtctctactaaaaacaaacaaaaaattagccaggcaaatcgcttgagcctgtgagatcgaggcagcagtgagctagatagctctctgcactccagagttgggtgacagtgtgagacgctgtctcaaaatatatatatatatatatgtatattatataaaataacaaaaatacataaatatataaaaatatacttgatattgctgatacagaggactcctgaatgttcagaaggacggctctgacgctttgggacagtagtcggggaatcagtaaaccacacacttccacggccctcaatttcagggtaacagccgtcagttctccactgcttctcaattatttgaacaataaatgaattttgaattttaatgtttctcagtgaccatgtggtactgagtatgttttttgatgcccattatctgggatgtattttcctcctacctcctccctcagtggggctcgtttctggctgcccccacacagtctgatagaacttggttccctccagatgtgtccagatctgggatgtcctgcacagcggcccctggcctcctatggccttggagtgcttgaaatgtggctgccgagacagaggaactgaattttaagttgtatttaattttgattgaattagagttgtcacctgtggcagatggctactgcactggaccgccacccaagaagcttaaaatcccaggacactcaaatgtgggtgggttttgtgttgtgagaacaagaaatcctttatgaagaggtttttacaccttgccaagtacatggaaaattatgcaatttggccacgttgcaggatggagtggagccctctgtgctcacggcaagaccagcagtggagcgtagggtttgagcactctgtgaattctcgtcatgaccacagtagagaaaggacacagaaaaggggcgaaagagacagtaaaatggaaaggcacactgtgaacaggcgtttacactggaaggcctttgttttatagctgaaaacgaaatctactggccaagttcaatttaaattttagctggaggctttgcagaagacctgttgcagcagcgatagtgcaacatcattaacaaaaaaagaacaaaattggagaggaaaactatggaatagccaggaagcagactgaatgtcagcctcaatgaggccagaagaagcctcaacgaggccacagcagcacagagcaggggcaggcgggcacacagtgtggctcgtgcctggatcccccgctgggaacctggtgcccgttggctggtgcactgggccctgaccccctgagccgacagagtccaggtgagcacagcacgtctgtttccaggtgggaaaccctctgcctggctgccgccgtgacccagtagatctgagatcacaaccattacagctttctgggtgatgagggggacattcacactgcagaagagtaaggacatcccagcaaggtcatcctgcagccaagacccaggtcagttctggagaagctgaaggcgtgggaaaacccgccagccttgggaggctccccaggccccagagtgaccccgttcttggagcactggtcctttgtccccacagtgagagggtggaccccatcaccttccacagctgtgctgacacctgcccacccacccctcagccagagtcacttaggtggccaaggaaaaagtaacttcagatcccaaagtgtttcttccaggcccggaaggtgcaggaagcggccagccactgattgcccggctggcacctgcagcaatgatgctattctcactcagccgatttgtgagcagatttttctgattctttgattcttctttgtgagatttaaggaaagcctatgtgacagtgccactatcacctctccaaattcttgctgtctcctcatgtcaacatggagtgtgcagtgctaagatgtcttccacggctgggctttgcctccatatctgtgggcaggagatctgagccagtgccagatgtggacaaaactcaagtcagagcccagaggacggccctactgtcaatcagaccaggggtgccctgaccacaccctcttcccagaggacgaccctgctgtgatacagaccggggtgctctgaccctctggcaggctcaaggccggcctcattgcgggctgaccttccttcctcgtgtcctgcagctgcgtcccttacccttaccccaaataaaccaccttccctccatcctgacccgaggccctctcctttcccaggacaatggaggccggcaggtgagctctgacaggtgtgtttaacaaccatgggtgcaacagaggcggctttccctgctccctttcccgaggtgcagctggattcagagcttcccacctgcttgtgaccagcgtgcattctcgacatacacgcttcagaccaaatgtctgcttgttcacctgtgcgggctttgtgtgggctgctctgtgctatgcgggctgctctgtgcgggctgctctgtgctgtgtgggctgctctgctctgtgcgggctgctgtgtgctgtgcgggctgctctgtgcttgggaaaatgaaggttggcatgatttcctgcggcaatgccctcccgttttatgccttaataagggctagaaagaaaacattttcctcgagctgcatgcgaatatcgcccaaagtgcagctccccgcggaggccccgtgcacccttccaactgtgatgcgacagagatgggggaaaatgagttaaagtatgaggataatcggtaaagtgacacaaaaaggttgcaaatggcctcacttgaagcgtttgtattttaaaggtctcaggcaatgacagcgcatggaagttggctgggtagtttattctagacacgtgtgtttgtgactcagcctttcacgtgctgggttttaggagtcattattcatctgaagtagcagaaaagggatggcgtttcccccacgccggccagtcccttcccggtttttcatccgagcacttgctgtgggaggaacatttgatcccagcggtcgtggcgtcaggccgcctgctcactggagggaggatttccattagaaaatttcaaattcaaagttggaggcagctgcaccgagagtgtgagagataatgtcacccagacgtggcccctgaaagtaactcttgcatcgtgccttccttttttggaaaagggcactaccgtatgtgcttaaatggtgaattggacaggaagtgattcaaattcatttttttctccttcagatcatttaggcaaattaatatccaatagcacatatttcttgtccttctttatattctcactaaaagcaaagcaaggtagagacatcctggaatgctgtaatcttctctggggtaaaagcaattatggaaactggtattatcaggaaaaaagctctactaggtagtaagcctagaattccacttggaggttcagtaagtcagctcttgatatggctgggaaaggatgggaaaacttgctctctttcgtatattggaacttaagtttttaaatttcctctttccttttcttattttcctggtctgcccccaccaatgcccaccaagtgaatttgctaatgccatgtgtcacctcgcttaataatgaggattttgtcagaatacttacacacgcagctttctgggacaccatcccaaggtggggtggacccagcgactgtgagagtccattttcatgaagaatcctgaaaagagcctgccctgagaatcacgagatgggattttgtcttcggtcgtatgatcagctagccaggaagttacttaattttactagtctctgcttcctcctgtgaatccccaggataggcactctgtgaggaaaggggttcccaagccagcctttccccgcagctcagccccaaagcacgggacagagcctttgcatggcaggcgctcactaaagattccttgagtgaatgaaagggggcaaaattcacatccctatcagtcccacatcactctgaaataggccttcttagtggggaggtaaaaagaatttaagcatagaaagacagatgagacaaaacaggcgatatttgttactttgtacgtgagaggccaacccgttagaaaagcaagtgctccagcagcgagagcgatggatccgaaactccccgatcagatcagaagatactgtgttggccgcatgagcttcggtctcagccctctaagtagaagcagtgaagtcagaaaaagtgaactcagagctgatccactctaccacgttctcatgccagaaccccctggatgacctgttcaattcccacacaagcgatgacttctagagtttccaggtgaatgctcccaatttcccttcacaactgtacctgtttgccttggaatgcgtctgcttcatctgtggaaacgtagcctgtgaggacggagctctgcactccaagctcctggaaacaataacgtccctggacctccccaaggggtgtcagatggagccttccatgtaacatctgcatgtagtgttgtcatacgcctgcatttcgtgtaatgtctgcatgtggtgtggtcatatgcctgcattccgtgtaacatctgcacatggtattgtcatacacatgcattccgtgtaacatgtgcatgtggtattgccatatgcaagtattccgtgtaaagtctgtacacaaagtggtcatacgcattcattccgtgtaatgtctgcatgtgatattgtcatacgcatgcattccttgtaatgtctgcatgtggtgtggtcatacgcctatattccatgtaatgtctgcatgtggtgtggtcatatgcatgcattccatgtaacgtctgcctgtggtgtggtcatacacatgcattccatgtaacatctgcatgtggtattgtcatatgcatgtattccatgtaacatctgtatatggtgtggtcatacgcatgcattccacgtaacgtctgcatgtggtgtggtcatatgcctgcattccatgtaacgtctgcacatggtatggtcatacacacgcattctgtgtaatgtgtgcatgtggtattgccatatgcatgtattccatgtaacgtctgtacacggtgtggtcatacgcattcattccgtgtaatgtctgcatgtgatattgtcatacgcatgcattccttataacgtctgcatgtggtgtggtcatacgcctatattccatgtaacgtctgcatgtggtgtggtcacatgcatgcattccatgtaacgtctgcatgtggtgtggtcatacacatgcattccatgtaacatctgcatgtggtattgtcatatgcatgtattccgtgtaacatctgtacatggtgtggtcatacacatgcattctgtgtaacgactgcaggtggtgtggtcatatgcatgcgtttgtgtagtgtctgtatgttggtattgtcatatgaatgcattctgtgtaacatccacatgtggtgtcatatgcttgcatcgtaggggcctacttttgtgtctgaggagctccctgaaggaccctgcagctgggccagcagagagccatcatccccggtgccctactgtggttcaggtggtgtggaacggaggtgtggtgctctctgtcagccccgggccctacctttgggtccgtttgacttctctgttgctgtgatgcccatattatcagaacatgaaaaagtcattccactcaggatttgggactggccatggcacagttagcaaaaccaatggcctgagggtttttcaccctgcatcatggatcttgtaactcttacctcccttcgccctgcatggatcttgtaactcttacctccctttgccctgcatggatcttgtaactcttacctccctctgattccttgaaacagtaaccatagagtattcaaataattgccatgtaggctgccttctgccaactggaaatgtcttttcagaagctcacacaccctgggcaaatcctttcctctagaatgagtcccttgctgtccctacctgggaattccacttcagaagaggctctactgagcacttgggaaaagctcgcattggcatatttgctagtgttttccataaaaccaaaacgtttaagtagaataaatatccaacaaaaactaaattaagtgtatccatacacaggagcatatgcggttttaacttggtagcacatttgcttacagattttcatataatacattgttaggttaaaaatccagtttctgactgaaccatatgcatcatatgaccctgtttttgtaataaaactgtatttatatttacagtttgcaaatgtctatgtatgtatgtgtataaaaatatatctggaaggacacaaatcaaaattgaagaagcacttatatctggctggtggggttatgagtgacttttcactttcatttttaatatctgtctgaattctctagacttttaccatggccatactttatattttttaaaacacacacatgaaaagctaaacttagggaagaaagaacaatgagtcagactttcccatctgacatctgatgataactaaatcatttaggccaattaattaatagatgtagggaacatttgctaatcaccaaacttgcattactttttgacatttcaatacaaagtggcaagaaccacattgcttagtttgtctgctgtttggccaaaatggctagactaaaaatctgagttaaggtcattctgtgtgcatttttggctaatatgtatcacctcctatgataagaaaattatggaaaaattacttcacacatttcctgggtggtgggcactgaggcttctcagagaacactattttctacacatgttgatatcaaatgatatttgaatatttactacatatgtagcattgagatgcaagcttttcagatggttcctggacctttttcatttctgagaataagacctcgatttacgcagaaatgtttaatttgacagaatacatttcagaaacgtcaaatgggttagtctaggtccagccccactgtcatcctgaagttttcttctttgagttcaggatcacttggaatagaccctgaggctgcccttcagggactcggaattaatactcccatgtgctcagcaagtacaggcggcccggagtcgggtgaggtggctgtaaaaactctgtattagtcgtagaaactgcatgtttaaaagctgccacaagttctgtttatgacgggcatggcattactcccccaaccatagatgagttgggtcccaggcatctcgggtgacaatagaatgtagtggttaaaagcaagtctttgaagcccaatggactcaggtgtggattcggactcagctcctaaccacctgtactgtcttagacatttaaaacctcgcttcagtcttttatatacatattccctatgtaaaccaaaaataacattctaaggccccctaagcttctgaatgcacttcctccccagccagggctcttttaaaatttaacctgagagactgtttgaggcaatgttgggaagtcggggtcagacatgcctcatgatgcctctccggcattaacagcaacacagaccttaagtctgataagaaacatttacagcctcttctctctgaagcctgctacctggaggcttcatctgcatgataaaacttcgatctccaccaactcttattgcaacccagatgtttctttctgttgattccaggactttggacaaattcaaccaattgtcaaacagaaaatgcttaaatctatctataagctggaaggggcacccccccatccaccccccactacccccaaccccttccctgcttcaagtttttccacctttctggaccaaatcaatgtatttcttaaatgtatttgattgaagtctcatagctccctagaatatataaaaccaagctgcgccccgaccaccttggacacatgttctcaggatctcctgagggctgtgtcgtgggccgggtcacccatatttggctcggaataaatctcttcaaatattttacagagttggactcttttcattgacacttagttaaacatgtctactccacaagattgttacgaaaaatgaaaggaatttctgataaccacacaattgtcaggagcaagggaaacattctgtgaatggtaatcatcattattttagtgttgagaccctgcctttgtgatattgtcagagttgctaaaatacatggctacctctcagttctcagagagcctcacgtttgaagtagctgctagtaacagaggttgtcttcatataaccagatagacagggatcagagacaattgatctctggcctcacaaactataggaatctgagagaaaaagccacaggacactgcctctaagagggggaggtggaaggcaggaaaattcgctgtggggtgtctgatgcctgagagtcagagggcagtaaaacaaagggtggctgaaggcctttcctgcaaaccagaaaccagtgtccccagctagccatggtgtaaaccccgactcccaggaaggtccaggcccagatgccaccttctgtctgtgatgaggacgaggacaacgtctccacttttgcatgttccagctccttctgtcactcagtgtgtgtgtcaggtggtccagtatgtactagggactcttacagacacatgccaaccctacacatgtccctcttctcagcaatcattcctctccttcttcctttgcccgtttatacgttagttattgaactcgtggatcttagccccatttttcagtagcctctaaagactgttgcacttctacttctcagaatacttccgaggtcctcagaggacagcgtgcctgcagctcaggccaggccccttcatgctgggctccaagctcaccatggctcctaaccagacaccttgtttgtgccgctccagtccccatggcaggagcgactcctctctctcaccagtgcgaggatcacaatgttattgcttataaagcccttaagctctctttcaggtgagtttcaaatcgttatctccttacacccagcagacagatgtgagtccgctgcttggtgacatcatccttttgttagaagagcaccgactcacgtttctatagcaaatcgataacactatgtgacaaatccaaaatcgacaatggctatttcttagctttaggttttatttttcttcagagagaaacaagtatggcaaatatctgtgaatttctgtttaatctgatgacaaattaattaataatgataacaaatggttatctacttagatatgtaacgtaggcagtggaagtaatattttatccgaacattagaaccaagattttgtgtaagtgcaagaggacatagtctccaccccactgtgttacagatcaggaagttggaggtggctcggttacagggttaagttacatgcacgtcacgcagccctgagctggggaaaccaagaacaaagcccctatgcttgctgggccatcccaccccctcacattagatttgcttaaagaacctgccagaggcttcgtctggaatagcacctcggtctcattcatctctatcacgagtttctgcattttgaccatgagcctgttccaacatttcagattctccactcatcattaaaataactttattccaaccttgcagcttccaaattaatactgactctttccttatcagaaacaagcaatgatttagagtatcactgaaataaaatcaaaatgttttaccttgaggcttaattctctctaaaatctagtcagatgctccccatcccagtttcaccattatatcagcacaaatcttgaacatttcattttctaatctgtcatccttttaatctcctattttataaatgctcttttctgtataaatggcctgcatattataaacagtattgaatagcttgtttctttctctaatcaacctgatctgtctactcaatatccacccatgcatccatccatccatccatccatctactcattcattcacctattcattttttaattaagcatttcattaatttattcagcacttactatattctagacagtatcctggggatatgaagatagatagatagatagatagatagatagatagatagatagattagagagagagagaatagatgataggtagataattctttgtcactatctttaaggtacacaaaattttgtaggagagtctgagacatacaaacttcttataatacaatgaatgtatttggtgcaatagagcaaaaatagggtcaggactttatgactactaagcctcacaggtgttttgatgcctatggaatcaccacatataagtcccactaattcagtcgccatttgtgactaacgtgtccaatactcagtaggaaagatataaaagaaaataattagagttccttaatatctctttggtccaccagcaggcatccatgtttgtgatcttctgggcaattttcagacctgctggcatcacaagttcctccaaccagacttggataatgggtcaatcagcaagaagcacttttcctgagcccaagttctaaaacctccacagcaacagccctaatgaaaaatgtagtatctcccacttctcctttctattgcctttttgtttggttttcacaggaatctatttctgagtgtttgctgtaggcagacactttcctcatctccacctttgattacgagaacagcacagcccggtggctgcccggggggaggtggtaggcagggtcagagtgcacacgcgcgtgtgttcatgtgtgctgtgtacaggtgctgtgagggtccaggaactgctggctatcacagtgagcggtgacacaaaggcctgtaattctatgttgagaataatatttccagcctagaactagcagtctggctggaatgaaatacacagaaaatagtcaggatagtccaatctatgtctgagcctccagatttaaagatagtttatatccacaaatacatactgctatgtctttttacctttccattttcacagctagctgccaatttaagtaagcatccttgctttagttaagggctttagtaataaaataataataataacttcacgaacaggaagagattctataaatcctgagtttcatgccaggaaaccaccccagaaaacactttttgtactaatagctgtaaaaaaaggtcaggtacctgacttaaataattgctttcctttttgtatgtttgggggaggaggaatttctggttctacttgtaacacgtgcatatgaggttacacaaagatttctttcctggaaaactggaaataagcataatcaaaactgtaaaatgatcaaatactggtgcaattattttcttcaggaatctcacgatttcatctgcgggagtggatctgaaatctaaaatctgaaaacatttatttcactttatgattctttttattccacattcttctctaattttttccttgactgaaacattggtatctctgtttctcatggtctctcttcgcctcagccgtgcagttctgtgggtatctagggggccttttcagttcaaagtacatcagcagcccgacgctggtggtccacgttttcctgtcggctctgtgggttgcatctgtgtcctgttacctcggaggggttgtatgtgcgtcctgagaggaagacagcctgggaagacagggtggcttgcagaagacgcccaccatttgcacagagctagccgaggcagctggcctgaacatgtgtgcatgcgtgtgcgtgcatgtatgggtgtgtatgtgtatgctcatgtgcttgtgtgtttatgtgtgtgtatgtgcgtatgtgagcatgtacgtgtgtgcgcatgtgtatgttcatgtgcttgtgtgtgtgcgcgtgtctgcgtgcgtttatgtgcgtgtatgtgcatgtgtgtgagcgtgtatgctcatgtgcacgtgtgtctgtgtgtgagcacgtatgggtgtgtgtgcgtgtgtgcttatgtgcgtgtgtgcatgcatatatgtgcatgtgcatgtatgcacgtgtttgtgtatgtgtgtatgcgtgcatgtgcatctgtgttgaggggctgttgctcaggaagcgagggacagggcatgtcctaggtagagacagctttctggggaaagccttgttctaaggcagcagggcggtcttgcacttgcgcggctgctcctgggatttggaaaggacacaggtgggaagttggagagatggcctggggcaggtggggtaggtggggcaggtggggcagatggggcaggtggtgcagatggggcagtcattaacgagcatgcctggaaccccatccctagtcttgtagaggaggcaaggagctgtccaactgtctcttaagagtggcacagtcagtgctatggtttggaggtttgtcccctccagatctcatgttgaaacgtgatccccagtgttggaggtggggcctggtgggggatgctggggtcaggggtggatccctcacgattatcttggtgctgtcctcctggttatgaatgagttcttgctctgtgtgttgcagtgagagctgattggtaggaagagcctggcccctcccaccgcctctcccaccacgtgatctctgcacaggccgctcccctccccatcggccacgagtgaagcttcctggggcctcaccagatgcagatgctggtgccacgcttcctgtacagcctgcagagccatggctgcacaaacctttcttcctcataaatcacccagcctcgggtgttcctttctagcaacacacacggactgagccggatgacatgaagcagctgttcccgcctcctcctggcacctccctgactcacgcacttggtgcgtggaggggtcgtgagcgggcacaggcagccacttcgctgcttgcctcatcagcctcacagttccccacaggtgagtcctggcatagaaacatcccctgcatcttaatttgcatttgttaataattatgtgaaatagagaaaataacttatttgtgcacagctctgacttccaaacgaaaccactccagctttttggaagcttccgcatttggggatgatattaaccaagtgaccacagacgagagaggcactgcccttctctttaacccagaaactggtcaggagcctgaggagaatgacaaagggaaagaattcttacaggaacttctccctccgcttccctcagtttaaaactacagtgctcgccacagaatctcacttccaattccttgtggagaactgcttcttgtacttatcgcatcctcatttacgatatgactctgctagtattttaaatacatgtctagcgttccttatagagacattctcatccccacatagatcggtggttatgagggagttttctttcctatgcctaggattctgttttgatgatttttacggggtttgcttacagtagtaactcagcaaactgcctgatgatatttaaaaacttcttcctccttgattttcattttaaatcaagcaaacacaataatccacaaaaactaaattaaaatcaatgcccttaacatgactggcaagaagaatgctgtttctgttgtaagaagacttgctatacataacaggatgattagaaagacttgctgtaaaaagacttgatatacataacaggatgatatacataacaggatgattagaaagttaaaaatataatattgtgagatgctatttggtttggtaagacgggggtcagatagtctatcagaataattttcttccgtttgatcacacatctcatcagaggagcaggagagccgtccagcgtgagatatttgaaggggtgttggcaagaacatcagatggacgacaggggagaggggcccagctgcacggggagaagccgatgagggatgggtctttgctgtcatcaacattcataaatttatcattctggatgcacaaattaaaattattcactaagcaagaatgccattgaactgaacgttataaaaatcctggagtaagtagaaaaatgccaggctgatatatctgtgcagtaagaggcatataattctgcctccatcaataacagcccccacactttatggactcccctcttggaggtggctgtgaataacccgaatgcatgtgcagcctctcgacaaactcgtgtccgcggctgtgggctacgttctcgccaatggctgtgtcttcggccaacacacctgagcttactgcattaatgttactgtgcgatacagcagctccgcgcctcctgtgagtgcccgtgttcacttcctaaactgctggtctacccagatttttaaagggacatatcaaatactgttcctccatttctggttcctttcaagctgcgttggtatcgatgtttggaacccctggccacatttcatatttatgtaactgatctgacagtgcacgtgaatctatgagcagttacttattgagtccctgctgtatgtgaggctctcaggaaggacttatggatgcgccaaagtactgctgatgataatggtgtgaggaacacacttttactcctgttttatagaggtaaaccgtggtatagaatttcacgttacttgtctgaggtctttggtcatcccagcagcgcccggtgtgagccctctcaagttctccatggttttcccatcacccacacccctcctgtcatgctggttgatggcactcttgcccgttgggtgagaaagccctttcctggacaggtgatgccctttgtagtgaaaacagttagatgctgtcatgtttggtcagaagctgaaccacagattttagaatgaggcaatgatggcctgagagggaagtggattctgttgacaccagcagaatgtgtggaattgggattttgaaagtgtatttacccagtggcatgtggtcccaagcgggatctgccctctatgagctccagactggactcgtcctgcccctgtggtctgtcccttcctaggttcccacggttctctctttccccacaatgtagctttgctttggactagtttttgggacaagatgttgcttgtgaggtgggtctgactgcaggagccaagcagcaccaccccaacaaatcctccaatcagtccacccaccatgcccaacaccaatcctccaatcagtccacgcaccatccccaacacaaatcctccaatcagtccacgcaccatccccaacacaaatcctccaatcagtccacgcaccatgcccaacaccaatcctccaatcagtccacgcaccatccccaacacaaatcctccaatcagtccacgcaccatgcccaacaccaatcctccaatcagtccatgcaccatccccaacacaaatcctccaataagtccatgcaccatccccaacacaaatcctccaatcagtccatgcaccatgcccaacactgcgagtcccccacagattgagggggaagattagggaaggcgaggacctgagaaatctgactccctggggtcatcagcacccacgagacatctgcctgaatccgcccctgcacagtagctatggccatccttggccctgggccccacacccttccactcttccgatgcaacgtcacctctcctgtgaccccttccatagttttcccctcaccgacacccttatcaccagattctaaacattttcaaatctcccccatttaaaaaatagcccttgttggagcccctctgcccctgcaactcagtagcttccacgggagggggaggcttccccaggagacagaatgatgtcagcagaaactattggttgtgagacttgcgggcagtgctgctgcatgtagagggcagagttcaggggcacgcgcagggcaaaggacagggtatctccaccaccagtgcatggctgggaagccgctctctgctcccctgtgactgcgggcacacgtccactgccccctgccaccacggacacccatccactgaaccctgccactgcagggacccattcactgcccctgccactgtgggcacccatccactgctcctgccactgtgggcacccgtcaactgtccctgtcaatgtgggcacctgtccactacctcatgccaccatgggcgcctatccactgcttctgccagtgctggtacctgtccactgcccctgccaatgcgggcacccacccactgctcctgccaccttgggcacccgtccactgcctcgtgcctttctcctctgctcacctgttgcccctgctatgggatgtggagcatgcagccgagttgcccgaccgaaacgcccctctcagagctcagtgagggtctccctcctggcacccaggtgaagggacattgttcagacctcatcctgcatggcctctgccccaaggcctcccacacccacaacattccctcctcctgaaacacttgcgtcctgggtttcctcatccagtttccaaacccagcacccgggccacagtcacttcgtcctcctttctccagcctgccaggtcctcgtgagtgcgtctcactgaattctctctctgcacggccactgcttcagccagggtcacgtggcctctgtgggagccacaggacgagactccttgcggcctgctcttcatgcggagcctgagtgggcttttctgttcatcagcctcgtccgcccctgcgcccaaagccctccatgcacaccgaccgcttgtcggtttctagacaagatccgtttagaaacagtatgtgggcaccccatactctccaaactcctctcaagtcatggcccacactctccctgctcacggcatctctgggttctctctccagctcactgaacttgtttcgcatgtatgcctttgccttgaggcttgctccccttcaactctggaaacccacttgtcactcagcactcaggtctcagcactcagcactcaggtctcagcactcagcacccagcactcaggtctcagcactcagcactcaggtctcagcactcagcacccagcactcaggtctcagtactcagcacgcaggtctcagcactcagcactcaggtcagtcgttgcttcttcggcaaggtcggccctgagcatttctgcctcccattaggttagatcctcgaatgaggcttttggacaagccctgcgccatgatagctggcgatccacagcctaccatgtgctccaggatgtcctgcccgtgggccacccataggttcgctgagtgcctccccctctactatgtcccacgcaggcagtgggcagagtaaccacggaatgatctagtaaattagtgagtggccgaacaggtcttgcctttttgggagtgcaggatcatttcacaagtcgatcccatcaggacaaagcgagtgtgcaggctgctgcatgccaagggctcctcctccaggcagcccttcgcgagaggcatggccaattctccaaagattcaaatctttctgggcctctggctgttgacagttccttaattaaaaatcctccttccagcccccaaatggataccaatctacaatattccacaccaactgcagctcagtcaagcattttactcattgcagtgataactgtgcaggctgatcattgttacagccacacagtaatagtgctctagagactgggtgcggtggctcacgcctgtaatcctagcactttgggaggccgagtgggtggatcacaaggtttggagtttgagaccatcctggccaacatgatgaaaccctgactctactaaaaatacaaaaattagctggatgtggtgtcaaatgcctgtaatcctagctactcgggaggctgaggcaggagaatcacttgaaccccggaggcggaggttgcagtaagctgagattgtgccactgcactccagcctgggtgacagagcgagacttcatctcaaaaaaaaagaaaaaaaaaatagtgccctagaattccagctttcctcctaacaacacacgtggtccacatccggtgtctgattcccatccccactggaagttcctccggcattctgtgtattttctgtgtgttgttttcaaaaaaacaccatccggtattgtaggctgcaaacttacatcaaatagtttcctgcctgtgatttgaatcagagcaaaacatccctgggcacccaggcactgtccccgaagaggtaattattggtgctcccactgcgtgctgcctgcaggtgttttcctgtatcagcccgcaccattccctgaagacagacggttctgtgatgctttctggatggcgttttcctgtatcagcccgcaccattccctgaagacagaccgttctgtgatgctttcccccttgaagacataatgtctatctctaattcccacactgattttctttcttttaagaaaccaacaaaaccagcaccaaaaacagctgttgaccctcatcatctgaaagcgtgggaaccaactttcccccgtgatctcccgctctgatcttcatgacacctggctccccgtgtctgttcatggggccttcggtgtgggctcctgtttgtggagcctcagtggcccgtccctgtgtccttctgctgtgggcctgtagctgggaaattcaccccctggcattgaccaggggaaggtgcgattccctgtggagttgggaagtggctctcaggggtcaggcattgggtgctgccccagtgcatgttatgggcagctgtccactgcgtgcagggccagtgagacaccaagaggtcatcacgggcctcttctcatctcagtgccagccgtgatgatcagaaacatttctttagggggatgtgaccgctggctatggcgccgggactcttctcccagtgggtcaatcgcaccttcactctgggcaggtgagggcacaggcaggagcctgaatgtgcaggtgcccgcaggcgaggtggagaatgggcgcttctccaggaacttaaatcttgataatgaggcccatctgaacccctcaggctgccccaggagcctcgcctcacctgcgggcatccagcggtgtctgtaatgaccctgccctgaaatgaaggggaggaaccgcatcctgtgtgttactccaggggaaggacagggtaggggccggcctccaccctcctcgaagcaaactctcattagatgttcctactgggccctggagagtaacgagccagctgattactgtctctagtgtaaacatcacctttttttttttttttctgagatggagcctcgctccattgcccaggctggagtgcagtggggtgatctcggctcactgcaacctctgcctccctggttcgagcgattctcctgactcagcctcccgagtagctgggactacaggcgtgcgccaccatgcctggctcattctttttttttttttgtatttttagtagagatggggtttcactatgttggccaggctggtctcaaactcctgacctcgtgatctgcctgccttggcctcccaaagtcctgggattacaggagtgagccactaccaccttttaatcacgaccaaacatcaccttttaatcacaatcctgagaggtgtgaccctggcattgccacgtgcgagtccccctaggaaaccaaggctacgctgggagcactgtggggctgtttagggactcaaggccatgccacgtcctgactctgcgatgcctcccaagggtgagcagtgggttcttgcctttgccacaaaagatgctgcccttgggaataccaggatgagttaatgatttctgagcatatttcctaaactatgttccaaagagcaccacagctagaggtttgaaaggaatttaggaaagatcttacgcatattccatttcctcctcggagtaacatcagcgtatgaaatgcccagacaagtcctgtgcggaagagaagcacccaccctccccctctgtcagcggacgggaccctcatggccccaagggaggctagtccacgttcaccacacacgcattcctagaagtggtttttaacgtaatcatttaggaatatttttgtaaataattttctgattatcaaaaccataattacaggattttaattattttatggatatgcaggttgaagagactgggttttgatgactttgatgggggagggagggagggagagagagagagagagagagattgatttagtttctgaggagacaaacactagggttaagaaggattagaaggcgattttcctgcattgaaatagtttttttttttttttttgagaaggagtttcactttgtcgcccaggctggagtgtaagggcatgatcttggctcactgaaacctctgtctcccgggttcaaccgattctcctgcctcagcctcccaagtagctgggattataggcacccaccaccatgcctggctaatttttgtatttttaatagagacgggggcttcaccgtgttggccaggcttgtcttgacctcctgacctcaggtgatccacccaacttagcctcccaaagtgctgggattacaggcatgagccaccgctcccggcctcttgcactgaagtccaaaggccagaagaacccggaggctttcggcgtttccgcctttgccttccgatgtccattcccatctgagcagtcatttctgcttaattccgccattacttcctcccttgatgcttctgaaactgtctcctcagcagatgatccctgcattagttggcggagctgatggtgttccctgttttaccctgtggtctcatttccggatgctgctaccaatgcccgtctctatggctccctgcccacgtgtgcagccccgtcactgagagggaagtggctggagaggtgtccagatcattgtgaatgaagtcatctgtgaaaccatgggagagagatttgatatctgcttccctttcaaatgaaaggaaaagagtggggtgagagagggcggcactccccagacaggccctgaccacaccctggccccacgcctcagcagaacaactctgaacctctatggactcacaggggcgaggtcggggcaaggagactcagggcctgcgctgctcaccgggtgagaagtcacagctggttaggaggccacaggtaagcagaggtgcgagccaccagggacggggtgagttattcacaggtgaatgagctaggacgaggcaacagcacgcaggccacgcctcgccaacccatgggtcctcaacaggattttggtgacacgcaacacccctctggctcctgctctgatccatgatggtgagggaggttcccacggtcacgcgtgtgctgggattctgctctttacgccgtccccgggcaacacagacatcagctcttctctcctccagctgagcaaatgtaagctgtccaggagaatccatcccagctgctaacaaaatcttcagacgagagtcagtctgattcggagtggaatgaaatgagcattcggcaatacctccgtgtgccagtgcagctgagttctcggtaaacacaatattccgaggtgatactgagctctgcgtcctcagattaaatgtatctccttcttagatttgctcgtgcactttacggcttctgcaaatgacagcctcggcgctgcaaagtaattccacactgtcatatttgtctttggaaattgtaacaaattatggtgatttataacatcaaactcaactcccatttttccccagacggcaatgtcgctgatggcgagattccgggccatccatttatcctgtgtggaggctgacagggacgcatgcctcatctgctgccaagacactgggttcccttgaggggactctgtcgacataactcaccctgtcccgggtggctcgcacctctgcttacctgtggcctcctaaccagctgtgacttctcacctggtgagcagtgcaggccctgagttcccttgccccgacctcgcccctgtgagtccatagaagttcagagttgttctgctgaggcgtgggggccagggtgtggtcagggcctgtctggggagtgccgccctctctcgtcccagtcttttcctttcatttgaaagggaggcagacatcaaatctctctcccatggtttcacagatgacttggaatcctggccttttaggatagaaagagaacacagagatcccggcccatcaagcaggccccagaaacatgggcagcagcaggagagtgcccaagctcctggcagggtgggtccaaccctgtgtcgtgcccctgattcaggcgttgaagcctcaactccagatgctggcatgaggaggtggttcctggggaggtgatttgggttagatggggtcctgagggtgaggccctcacgattagaagagaaagagaccgggctcttgctctctgccacacgaggacacagaaagcgccatctacaagccaggaaggggccttcatggcaatcctagtgggctggatcttggtctttggtttccagccttgagaactgagaaataaacatttattgtttaaactaaaccaccaaatctatggtattttgtgatagcagctgagtgggctaagacaccttcctcccagcacagtgtcacccaaaaaccttgaggcttctccatcagcaacggactgggaaggcaggtctgcacctgcgtctccacgttccacttcacatgtggcatctggcaccggacggtggccgcctcctttcagattactcacggctctagaatctagcttatatgtttattttctgaatgttgtaactaggactctggctctagacaggcaaaatgttcccaagaaaaatgagaaaataaaaattgctctttttcaatggggaaattgttccctatctaataaatggtgctgggaaaactggccagccgcaagcagaaaactgaaattggactccttccttttacttatacaaaaattaacttaagatggattaaagacttaaatgtaaaaccccaaaccataaaaaccctagaagaaaacctaggcaatgccattcaggacatagtcatgggcaaagacttcatgacgaaaatgccaaaagcaattgcaacaaaagccaaaattgataaatgggattgaattaaactaaagagcttctgcacagcaaaagaaactatcctcagagtgaacagacagcctacagaatgggagaaaaattttgcaagctacccatctgacaaaggtctaatatccagcctctataaggaacttaaacaaatttacaagaaaaaaacaaacaaccccgtcaaaaagtcggccaaggatatgaacagacacttctcaaaagaagacatttatgaggccaacaaacatatgaaaaaagctcaccatcactggtcattagagaaatgcaaatcaaaaccacactgagatgccatctcatgccagtcagaatggcaatgattaaaaagtcaagaaacaataaatgccagtgaggatgtggagaaattggaacacttttacactgttggtgggaatgtaaattagttcaacaattgcagaagacagtgcaacaattcctcaaggatcaagaaccacaaataccatttggcccagcaatcccattactgggtatatacccaaaggattataaattattctactataaagacacatgcacacgtatgtttattgcagcactgttcacaatagcaaagacttagaaccaacccaaatgcccatcaatgatagactgaacaaagaaaacatggcatatatacagcatggaatactatgcagccataaaaaggaaggagctcatgtcctttgcagggagatggatgaagctggaaaccatcatcctcagcaaactaacacaggaacagaaaaccaaacacagcatgttctcactcaaaagtgggagttgaacaatgagaacacatggacacagggaggggaacatcacacaccgggacctgtcagggggtgaggggtgaggggagggacagcattaggacaaatacctaatgcatgccggtcttaaaacctagatgacaggtcgacaggtgcagcaaacccccatggcacatgtatacctatgtaacaaacctgcacgttctgcacatgtatcctggaacttagagtaaaaaagaaaaagaattgctttttttaaaaaattgaaagttcagaactgcaagcagtagctcctcctagagcaaggtggtgaagggctcaagttggagtgcttctgagacacacacagatgacacagaggcctgggggatctcctttagaggctggatgtactgagcacctgcctgcctcccttcccttccctgtcagggccaatgccgtgttcttgcatgtgtccagagagcctggcagtctctccagtgcctgcgtttgtggctgtggctgcaggggtcgcagacctctgggaaggagggagcccgtgggtctgtgccggctggtgggtgtcccacaggggtcttgatctgggactggccagactgcgaagccccttccagagcacaagccggaggggtctcctctgatccctccttcaccctctcctcaatttgcattagacacaggggatccaggagtgagacaggacatccccaagcatctggtagacgagagagaagtgggcagctgtggcagagcccagtgtgagttatctcagaggatcacgcggcccccagaggacatgctggacgcacacctgacccagacctgcgggaagagtgagaggcatggaggccacagggcacttggaggatgggcatcacgtggtggacggggagcgttctgcccatggacgtggcctgggtgagggtatagtaggctgaggccaggcatgccgaggggctcgaggtcctttagtgccactagaggacgtcacaacgtcggggccatgggagtcgaggacaggaactcagcagaaatcagggcaggagaagcctctgctgcccatgccgcctgaccctggctgctgccgcatgcagtggacactcagttccacccctagagggagagtgacaggctctgcctgcccagaagttcacactgcacggcatcccatccaccctcaccgaggcctctctgcagtcctgtgggtctcagagggtgcaggcgtcattctcacgacaggtgaggggtctcaggccagagagggcagagacctgcctggctccacacagcatgcacgtcggccctgggatgtgagtctctgcatcctacagccagagtttcctctaggagactgtagcggaggggaggcaaggccagagcgggtataacagaaactccaggggcagcactctgggttcaaagccggccttaggatgtagctgctctgggattatgcaccttacttaacatttcctgaatgccttgtctctcgtttatttattttttggttcagcagtgcaacagatgtgctacccacttgctagtgagcatgaaggggcctggagtccttctctgcctaagccttgcaggtgttaggcactcactccacagcggctggtgccattttctccatgccatggtctggtctgatgcaaacccatcgaccagtgctgtgtgcctggcttccaaggctacagaaaggggacattgggcctgttggtgttgaagtgcaagtaacctctccgggactaggctacctatggtggtctcatttctctcaaacaggaaatgaaacacaactggcaaggtagagggtacaccggaaattggggaggcccacccatggtgtttggaaccctgaagttgcccaggagagctagttattgccttcactttgcgagggaatttaaagcggcatgctcctgtttgacaattttgcttttatttacaggggctggatcaaacgtatattttatgtgataagtggaaagtgtcaaaatgagccacacataaagtggtgacaaaataattcacttcaatgaaattacataatgtaaaacaaaatcttagaaacagcccccgttaaatatgatttgcatgcaacataacattatacaatttttgacactctgcaaagaggtattgggtcggaagtagctatgtttagaaggcaatttgcagaatttctgttcttttagtggtttgaaagcagtgataattttttttttcttttggtggttgacaagtgaacaaaaaccaataattgaatagcaccattttacccagaaggcaagctgataattagaggtgtaagagacagtttggattttatctgaatcgtggcagctctgacttgtttttaaaatctgggaaccaaatcaaggccccgattctcaacaatataagaagaaaacaggattttatttgcagttgctcgttcttggctgacacatgtgttttggtccctaaagggcagcccgtgggtcctgagatgagcaagtccacatctgatttaggaaatgaagagtttctcggtggccaacgtggtcaggaggagaatgaaaataaactcagtctatgccaccgagggcacgtcaggcaacagcccccgccctcctggtctggctgcctcaaggaatgttccagggcacgtgagtctcacctgcggccttagaaggtagcaccccactcagacgcaatttgaaccccatgatcacagccgcccagaccccactcagacgtagttcagaccctggatcacagccgcccagaccccactcagacgtagttcagaccctggatcacagccgtccagaccccactcagatgtagttcagaccctggatccgtccagaccccactcagacgcagttcggaccctggatcacagccgtccagaccccactcagacgcagtttggaccctggatcacagccgtccagaccccactcagacgcagttcggactctggatccgtccagatcccactcagacgtagttcagaccctggatcacagccatccagaccccactcagatgtagttcagaccctggatcacagccatccagaccccactcagatgtagttcagaccctggatccgtccagaccccactcagacgtagttcagaccctggatcacagccgtccagaccccactcagatgtagttcagaccctggatccgtccagaccccactcagacgcagttcagaccctggatcacagccgtccagactccactcagactcagttcagaccctggatcacagccgtccagaccccactcagacgcagttcagaccctggatcacagccgcccagaccccactcagatgtagttcagaccctggatcacagccgtccagaccccactcagacgcagttcagaccctggatcacagccgtccagaccccactcacactcagttcagaccctggatcacagccgcccagaccccactcagacgcagttcagaccctggatcacagccgcccagaccccactcagacgcagttcagaccctggatcacagccgcccagaccccactcagacgcagttcagaccctggatcacagccgtccagaccccactcagacgcagttcggaccctggatcacagccgcccagaccccactcagacgcagttcagaccctggatccgtccagaccccactcagacgcagttcggaccctggatcacagccgtccagaccccactcagacgcagttcagaccctggatcacagccgtccagaccccactcagacgcagttcggaccctggatcacagccgtccagaccccactcagacgcagttcggaccctggatcacagccgcccagaccccactcagacgcagttcagaccctggatccgtccagaccccactcagacgcagttcggaccctggatcacagccgcccagaccccactcagacgcagttcagaccctggatccgtccagaccccactcagacgtagttcagaccctggatcacagccgtccagaccccactcagacgcagttcggaccctggatcacagccgcccagaccgcactcagatgtagttcagaccctggatcacagccgtccagaccccactcagacgcagttcagaccctggatcacagccgcccagaccgcactcagatgtagttcagaccctggatcacagccgtccagaccccactcagacgcagttcagaccctggatcacagccgtccagactccactcagacgtagttcagaccctggatcacagccgtccagaccccactcagactcagttcagaccctggatccgtccagaccccactcacactcagttcagaccctggatcacagccgcccagaccccactcagacgcagttcagaccctggatcacagccgtccagaccccactcagacgtagttcagaccctggatcacagccgcccagaccacactcagatatagttcagaccctggatcacagccgtccagaccccactcagacgcagttcagaccctggatcacagccgcccagaccgcactcagatgtagttcagaccctggatcacagccgtccagaccccactcagacgcagttcagaccctggatcacagccgtccagactccactcagactcagttcagaccctggatcacagccgtccagaccccactcagacgcagttcagaccctggatcacagccgcccagaccgcactcagatgtagttcagaccctggatcacagccgtccagaccccactcagacgcagttcagaccctggatcacagccgtccagaccccactcagacgcagttcggaccctggatcacagccgtccagaccccactcagacgcagttcggaccctggatcacagccgcccagaccccactcagacgcagttcagaccctggatcacagccgtccagaccccactcagacgcagttcggaccctggatcacagccgtccagaccccactcagacgcagttcggaccccggatcacagccgcccagaccccactcagacgcagttcagaccctggatcacagccgcccagaccccactcagacgcagttcagaccctggatcacagccgcccagaccccactcagatgtagttcagaccctggatcacagccgcccagaccccactcagatgtagttcagaccctggatcacagccgtccagaccccactcagacgcagttgggaccctggatcacagctgtccgtccgcccgagcagattcttgtccaggtgtttttccacttgcagctccgcgctgggcagcttcaggcctgttacagcgacggtgcggcttccctgcctgggttgttgggacggaagggattccaccctggggcggtgtggggtggcttccctgctctccctgctctctgcgttcccacggtgcaggatggcggcgttgagagccagaaacgaaaccctgagaagcagaagccgggcgtcctgcccgccctcctctaccaggcctcatctggagggctgcgccaggtccttccaacttcaaagagttgcctgtgaagggcgtcctccaggtgggtctgcagtgcagtcaaggcctcctgcaattaatatgctgggaacacattttaaatagctccctcctcccttgaatagcagacggggacaacaagcctgttattcagtattccatttttgatagctcattgtatctaaaaagagatcaattaaagctctcagaaagctctccagcttaattgaaggacaatttagacattgcagtaacggcagatctgccgtccattgccgcatttattcgggctgggagctattggcgtctcccacacaccctcgcagatgaagagatttcaactggaaaggaaacgctaccatcagaggaaagataaattgtcaccaacttcattcttcaacggataaagggagctttggaaataaaaaatagacccgaaccatgatgtggtggaattatctgtgcctgtgctctcctgagcagccgggcctgcgttccttcttcttccctgtgaaggggcagcgctgggcccgcttattagtgcaacagcaaagactcattaagtttacagcccgcccgtgacgtgaggcagctctggccagaaatctcaagttcatcccatcaagtcaattttgtctgtattttaagaacttatctcttgcaaaatgggaccttaacatgtttgtgatggtccacagatagctcttactgaaagcgagaatggcaggtgaccaaaaaaaaaaaaaaacaaacaaaaaaaaaaacacacaaaatggtgacctcagggacgtgatgaaagggcaatgatgacttcactgtgtgttttcctgaccgtggagtagagccgtcccaggcagactctctgggccctgctcaggacggtcatgaaaccccatgctcttgttatgtgaatattgaaagcaacgccagggtctgggagggcagtgggatgagcctggcctggggcaggtggcaccagggctgctgagtttccaggggcactggctggtgagtggccacagcccctcccgttggtcaccacctggtgggcagcagcatgaagcccccgggggtgcggagtgttgggctgtgtgccaccttcgggggctctgatgagcagctccactccttggcccagggcaggcttctcaggagcaggcttgggggtctgtggcttttcacacgggacgtggactagctgcttgcctgagagaccacccttctggattccagaggacccagccagagtcgtcacggcagggtctgcagggttggagaaggctctgttggggccgggcacagcaggtggtggcaggaggataatgccggggcctggacagggggtacaggggcgggaatggatgcacaggtacagaccctgctcttacgtctaggaggcgggtatagtcaatgcgatgtgtaatgtgtacatacagtgtgaaatgtatgtagcatgtaaagtacacataataaagtttatatgatttgtaaagtacaaatgctatgtcaagtgtacataccacataaagtctatataacatgtagggtgtatatgatatgtaaagagtatgtaatatgtcaagtaaacaaaatacgtatggtctatataattcaaagtgtctacattatatataaagtctacatattaggtaaagtctatataatatgtgaagtctataatagcaaagtatacacacacacacacacacacacacacacaatgtcccttgcagcaggaatgtggatggtccctgggaagtctggtaggcttggtgaactgacttttgctgagcacccagtaacaggagttgaaataccagctccatctctccacttgtctcacagctgctggccttggcattctgagcctctgtgtcatgcggtgccacttcattctgaagagtgtgtagcacagtgcagccatggctccatgcttcctaacgagtattgatcccactagggaatattttcagaaccagatacagtgggtgcaattcacaccagcatccttctctggaagactagctacatcttgcacttttcttccattttctatctttcttatgtttaaagatagttcaaaataattaaaatcagtgtgatctgaacatttgggggatgtttgtaacagtaaaccatagattctctgggatataagataaaggaaaacaagtagaacagaaatgagaatggatttccttgtacacaaagttagaagagagtttcagtgagctcccgcgggcagtgaccttgactgcgaattttgtctcttccctgactttttcctccccttcctccccttcccttaaggaagatggcctcggttagccaggaagggtcctcgtggagctctgggaatgctgtggccttagcagccaaggggtattacctgttcgtgggtgtgggcagccttggcagggatggcaaaggggcctatggtgactgtgctgcactccatgaaaagcaacaaggaagccccaaggtcagcagaggcagaagcgcagtgagggcgcacggggcatgtagtcagtgccctgcactctctagtgttgggagcagtcagcagaacggccagtgctagtgggcaggatgagggaggctgcagggagcacagatttcaaactgacccaacagtcccatagctttttgaaatgaacagagaaatggacccttctggtcttaaagcttgaaaattacatttgctttatctgagtttcttcctcaggaaatgacccttagtcctttaaaaaaaaaaagaaagcaccaaggagctgaaactcaccagatcactgcatcggaagagcaagacaccagccccttgcctgccttgactgcctttgtgaccacctgctgcctgttgactgatggctccccctaactctccctggttcctgttttcccacacatggttacatttcttccctgctacgtgaactcccgattttagtcggtccaggagatggatttgagactgagctctcctctcctctgcgtcagcagtactcgtggtcccagtgattggctttccgtgcagagagcagcaggatgtaggtcaaaaccctggtgtttcggcaacaggttcctgcacttacagaccggcctccacggggtgggaaggctctcccgtgcttccgttaccactgttgaccagctctaaaattaccacctgcaactcgcagtgaaaaattctgcctgtctgtcctgctcctgactttgaggagaaatggtgaggagatggggacacagcctggggacactgtggctctccaatcacaacactgccaccacaagtcactggagaaggggcagcaactctccgtgtcctgggtctcatctgagacaagagtgccaccctgtaccaggcatctcttgccccttaaggcagatgctaaagcctttgcagaaaggccacgtcccggctggaggatggtaatgatgtttaggagatcacagctgggcaaagggtgaaaacaacgctgggaggtcgaaaggctgcagaacccattacccatctcccgatagccattccgatggaaggccctgacaaacgactccctgcaaagccggataagccctctgcatccatcggctaatgccaggcaaggcgggaatgcgatgagggctggctggaggcagggctgccaggaagggagggtctgtgaagtgcgaacacactcactggttttggggaaagggtgaacaacccagtgagcactgcatgttaggaacaggtcagtaaacacagcctggcaggagcagacagaagccattcgtcgagagcgggacgcgggtgggaggccttggctacacagacacaggacctgaagataagatactgtggcctgtcggtcaccactctgtgtgcatagcagtgcaggtgacatcattacctttggggaaactgggagagatgctgcgcaggtgtatacactgtggggagggggagagaggctgtgcaagtctatgcactgtgttgggggcagaggctgcactggcgtatgcactgtggggagggggagagaggctgtgcaaatctatgtactgtgttgggggagagagaggctgtgcaggtgtatacactgtggggagggagagaggctgtgcaggtctatgtactgtgttggggggagaggctgcactggcgtatgcactatggggagggggagagaggctgtgcaagtctatgcactgtgttggggggagaggctgcactggcgtatgcactgtggggagggggagagaggctgtgcaagtctatgtactgtgttgtgggggagtggctgcactggtgtatacactgtggggagggggagagaggctgtgcaagtctatgcactgtgttgaggggagaggctgcactggcgtatgcactgtggggagggggagagaggctgtgcaagtctatgcactgtgttgggggcagaggctgcactggcgtatgcactgtggggagggggagagaggctgtgcaagtctacgcactgtgttggggggagaggctgcactggtgtatacactgtggggagggggcaagaggctgcacaggtgtatacactgtggggagggggagataggcattggtttgtcattgcaggactgatctgaaggccagagccaagactcagggcagggctgttgggaggcccctgacaggcctgggaaggccttgcctggtcacagtgttttgtgggcctgaggattcaggacacgtggtacttgcttgaccatatagtttattttaataatggaattatagagaatttctgttttccctctgggaggctggagtctgagctgctgtggtctgtcacacagacactgcctccctaagtgactgaccctcaataaaaaccttggacgccgaagctcaggtgaactttcccagctgaaccttggacccggaggctcaggtgagttttccagctggtgtcattgcacacattatcaccatcatttctgggggaactaagcccattcccgcaactcactgggcaaggatgtctggaggcaaatgcctggattctccttgttgtcacccaggctcccctcccttcgctggtgacaatttgtggactttcacaatgttaaacaatggctgctggtgcgccagccctacccagtgagtaccagtgagtacagagcctgaggggggtttcggggacccccggcatagccaaagaccccttcactgacatggtgaatacactgtgtaggtccagagacagtgatgacaaactaagtttcacagactttgaatttgggaaggccagtgagatatcgcagccaagataccccagaggcagtggagcagggtgaataaagtctcactagagggtcagatttggcaaatgcgtgggttgcagttgaagccacagatgtgaattgccgtccagtaagtgtagggggagtaaagatctaggataaggagagaaagagaaactggcactgacagaaagaaacaggaagagaaaaagctgacagaaactacatggaacctaccacactcaagggaggttggctaatggtgtcacgtgatgccaggacacctggcgagttaggaacctgggaagagttattttgtgacctgggctgacagttttattaaaagggacaagtgagtggccagagtgtgaggggccgaggcaggcctggcaggaatgagggtgggctgttaaggtgatctggctgggccacaggggcgggggagagaggcgttggtttgtcattgttcttgaattaagcatgttgagttgccaactacaagatgctaaaagagagggagaatctgaagacgtctgaggggaactgcagccgggtttcagtacagggtgggagcagaggctggcgtccggtacacggagttcgaaacactaggggggaatcactttagctggggggtcccctcctctctcactgaaaggtggagtggggtggggcgtggagctgggggggtcccctcctctcattgaaaggcggagtggggtgaggcatggagcagacatggctgagtgtgtaagttggaactcagcaggcaaacaagtttcctcaaaaaaattcgactgtctctgtttagcagggacacaaggcgctctttttgaaagccctgggagtggatggattgtgattcatctttgttatttgattattccaaaggtatatttgtgggagaaatgcaggaaggaaggagggagacgggaggagggtgcaggggtgagcagggtgcccggggttggtgtttccacccagtggcatggatttgtcctgattgtgctaagagaagacgctgcctccttttcttcctccgagacccacgcatggtcaaacagtttaaataagaggcgaacgcaatgcagagcacggcactgagagagctgcgtaagagagaacgcaatgcactcttcctcctcattgtcacagagttggccaaacccattgtccccatcctctagactccaaaaccgatgccctggaaaggcaggagatatcacagggtgcccagcgggacaacccgatccctgttcaagcgtgggaaccaccccagacccttccttccagccaactgcgatcccggagagacggcagccaggagagcctctcaccccctctcctgggtgctgggtctgcagcgtgagattagatggagctctctgtgcccatccaggaagccttgagtttctgttaatatgcaatacaagcttacaatagagggaatccctccaaaacacaacacaccatattgtttataagaggctaccagggactgaaaagtaaacacaaaaagacaaacaaagtcttccctacacccagcagggccaaagagatttttccctctttccaataagctctgagaaatggggtccctgctccccacaccacagcccacacctggaacccctccccgctgcaggctgcccggccacctgctccactgtactcggaaaacacacaactacattttgtttgttttcctctctgggcctctgatcgaatttttaagcacctccttgttgctttattctccctgaatttcctggaagtgctaacctcaaagtaccacggaaaatgccttcctagagtacctttggcctgacacggcgaacagcagctattttctgagaaagctcattctttggagagtctcagtgtaattgcactgattgtgctggctctggaaacctcagagccaccataggtctttgaaaaccaacgaatatgagtcaacacatttttgcagctaatgacgctctctagttgatgaaagccgatggcccacatggcccaatttaccacgatttactggagatataaatggcatgaacctcaggccccttcagggaggttgcagccacacagaccgacactggagaggttttagtgtaatgcagtctcatggctttggagtgaaaggaactgattttggaatttgttagggtcgtgggagctagaagagatttggagaccagtagatacctctgttgtacagacaagaaagccacaaccccgagtgcttagtcatttggcaagagtgaaggtgaagagatggtagatctagaatgcagagtctccgcctaacggtccccgcgcttcccaggccgccgtgcgagccctgtttgtgccgcaacaggaagaatggtgtggagttcggagactaaaggtgcactgtgcttttaaaataaaaaggacggcagaaaaggggctgttctgggctgtattcggccctgtcaaaattcacacgtggaaaccctgactcccaggacctcagaaggtgacagtgtttggagatggtgtccttacagagctgatgaagataaatgaagtcatatgactggaccctggtccaacctgcctggtgtccttataagaagaggagatgaggacacagacacacacagaaggaggaccctgtgaggacacagagagaagacgccatctgcaagccatggagaggcctcaggaggaaccaggcccctggacaccttgatctcgggtttccagcctctctgactgtgacaacgtgaatgtctattattgaagccacctgggctgtggtcttatgacagccccaggaaacttataggagccagctaaattattctccacttgcttaagagaggaaaacctgttgtccgggctgccacagtggtaaagtccttctcaccttcacccagacagtttctcaatgatccagaagatgcaaaagaggcaggctcgagcaggactgcactgccaggagcaggcctcacactttcccttcctgggcggctgtccctctgcccgcccttcctgccatccctctattgtagaactggtaaaacttccattattatttttaaagcaaaaataaaataattttaaggtctttcttccaatgacatctcacctggtaacccagaaatgaaacaagaaaacagagggagcacctgaggcgccagggcctgggattggctccaaaatccccttcctgcccctctggtggccgatgggccccaggtccagcgatggccaaatcgaaggtcctgccgggcttccggctctgaatgtctccgggacacaatgtaccaaatagacaggtgctctgagaagtgagggctgagctgggcttgtcagaatgtgctgggaaaggcagacagaatgggactgactggcctttatactgcagacatggagtcctggcctcaggaggggcagcgtggccaccccaggggggcggagtgaggtgagtgaggctgagcggctccaggtggcctcctgcgtggaggccaagccctcctcccgcatgtggcctgagcctcctccctcgcagccgatcacagaaccatacagtcccaatcctgccaccaagtcattatcaatcaggggttaaaggctgctcctggccactcccactccgagcaggtggctctgcagcccccaggatgcccatggggggagctggcctggggccaggagcctttcctttgcagctcatggactgcactccagggcagctgtggcctgtgccgtgtaagtggatacagcctcgggtttcactgcacgctccctcctctctggctagtttggggccctgtccttggggcattaggggcatgaaatgcctgcagacccacgggtgatgccttttagagagtgggtgaagagaagtgggaggcacagccccagtgctcaccccagggggccggagggagcaggatctgtgtgttcaccccacagtggctccagagaacatgggcggctgtcctgcctggcactcagtgaggggctgccaaggtcggcttcagggaacagtcaatcaacacatctactggggacaggaggagggagggaaggggagaagagggcgtgaagagcctttttctggcctggtcctgcccggcactcagcgaggggctgccaaggtcggcttcagggaacagtcaatcaacacatctattggcgacaggaggagggagggaaggggagaggagggagggaaggggagagaagggcttgaagagtggccctggagtcagagagcaccttcctctggcctggtcctgccggacactcacccctggcggaaatggaatggatccttgtggtcttggcaggtattttattggcctagattttctgtatgttttggtttttacctcctgtggaacggaacccttaattaattcgtttagtcactcattcagcaaatgtttgtcaggatctttgaggcagaaactgtatgtcacccccatggtctgtgcccagtcactgtgggaacatcctgggacatggggggagagcagtgtcacccgcagctccctgccggagaccctgccccattgctgggagcaccgcgtcctcgcagcccaggccagcaccatctctgaatgctaccagacaccaggtggctcataacattgggaaatgactgttttaatcgttaattaccaaaaaaatgtcactgtgctggtacaatatatgcggtgatttctgtcataaattgacatctgtaagtcataaattgcttagttttagctgcttttaatggctgaattttcccaagctacatggtgcacacattttggatcaagttcaaactcttctggcaccgggcgccttctgggaactggcatggacgaggcaggcagcggattctgacggcgtcagcagcgcgagaggcacccgacctctcactaaaacgtttggcctgctcccaggaagaggcttccatggaaagccagaagaccctttaatcagagaagattctagccggtctcaaaggaaggatgcagtttgcgccgtcgaaaatggaaatcaaaggaacgcgatgctctaacggactcgaggaggccggctccgtcttggcattgttcagaaacatcccggcttcttctctgtttgatttccaacaggttattcccagaggaaccacagtcctttctacccagaagcctaaaaatacatgcttttgagagcactgccagagtaggttaagaataaagaaggcgtttggagcgcaggcagaagacacttgtgctcttctaagcgcagcgaccgtggcaggaataacgagctacagaggccacacccgcacacgggaaacgcatttcccatcgccccaaacacaaaccctgcacctctggcctgtaaaggaagtccaggctcacttagaaccggtagaattctaaaattacacaaatcagcagaggaggcctgtaaaccggagtccagaaagtcggctggtggaggctgtgcagggttggaacctgcccccagcgctcagctctgctccgtcctctcagggggcctgggtcccacagcccagggcagagacagaatctggggtctgagtccccctgggtcccccaggctcatctcagcggccctatttctctttccccacccatctgcagggcaggccctggttctgtctccgggtggcctgtgccctaggctctgggcttcttactcagctactcagctctccagcatccacccagccaggggcaggggtgggcctgtggcttcctcatccctggctgttttcgtggggctcccagtccttccctggcccatggaatcatctcctaggattaaattccctctggtttaaacgcagagagtcattttgttctcacggttgggctgtcacagaaccatcaatgaatgctgtctcttccctggtgtatgctggagattaaaacttcacttaaaaacacaccaagaacctctgccccggtctccactgtcccccagccagcatccccccaagttctgctggtgacgctgaagcacaactttcttcccccgggggaggtgacttcagggcacagatggcttcccttcattctcctgctttccccacagcccccaacggtacttcagttattgtgggcatcagtaggtcctttccgatttcaagcaacatgtgtgtcctgggcctgttttgcctcttatttctaggatagctttgtttacactactaaaaaggtatttttaaacatttaacttcaacttttcttgtgggttcaggaggtacgtgtgcaggttgttaccggggtatactgtgtgacgctgaggtttgggatatgaacgatctcgtgccccaggtagtgagcatagaacccaatagtttttcaaccctgtccccctgccccctcccagggtccattgctcccatctttatatccgtgagtatccaatgtttacctcccacttacggatcagaacatgcactatttgtttttctgtttctgcattaattttcttaggataatggcctctagaggcatccatgttttggcaaaggacacgatttcattctttttgtatggctgcatagtgttccatggtgtcaatgtgccacattttctttatccagttcaccgctcatggacacctaggctgattccatatctttgctgttgtgaatgaacacgggactgcatgttgcctttgtggtaggatgatttactttctttcggatatatatcccagtaatcggacagctgactcaaatggcagttgtcttaagttccttgagaaatctccaaattgcttcccacagtggctgagcgaatttacatttctaccaacagcgaataagtgttcccttttctctgcaacctcacaagcatcttattttttgactttttaataattgaaaaggcatatatcttaaatacaatttgaagctcaatcatccttcgtaagagaagtgggggctaatgaagtttcagggaactcatgtcctgtggtttcttgaagtgtgagaagtttgactgcagggaccgtgagtgagtgtgctcttgataaaaatgaaggatggaccggggcttcattaagaaactgtgtccctgtgtcaggtatgcgagactacaaggcagagctgagggccttatgaaaacatatatgggccgggcgcggtggctcatgcctgtaatcccagcactttggaaggccgaggtggttggatcacctgaggtcaggagttcgagatcagcctggccaacatggtgaaaccctgtctctactaaaaatacaaaaattagccaggtgtgatggcgtgcgcctgtaaccccagctactcggcaggctgaggcaagagaattgcttgaacatgggagatggaggttgcagtgagccgagatcacaccactgcactccagcctgggtgacagagtgagaatctgtctcaaaaaacaaaacaaaacaaaaaactgaaaacatacatgttgtgcatgttaatgaaagaatggggaaacatttgaacataagaaattgtgtttttctttgtctgtctttcatatattctgaattatcagctcttagagattagggtctggaatccttcaattcctcacactgtttaatatgatgctcaagtgacgaaattcccaggatgagggggcaccttcccgtggctgggaaacgaggacacggcttcagggctccatggcttcctttcctcttcaccccaccaagagcaccttcaaagaaagccttcctctcaaacaaaaagtctttttttttttttttaaatttctttactgggggacaaatccctttgcttgagggggttctataagaggaaggggatagatgcattgtgtaggaaatcttggatttgtgtttccacttttcttggtgaagcaattcccaactctaccctgtgccgattccagagtcctgccagcaaaaatgctctacgtcttcctccttgtctctaaatattcccttccctcttactccctgctggtgcttcgcaaactttgctgtgcattcgaatcacctgggatcttattaactggagatttcgactccatggtctggggagggcctgagcatttgcttttttctgtctcttttgcagctgtcgaggatgccctgatgtctgttctcacatcacattgcgctccaagtaccccggctgcaaccagagctcagcaaaccgggaccagagggcacatccaccctgcctgcccatgtcaacagagttgtgtgggagccagccggcccccaggaagaccccagatcttcctgcccctgaccacagctctgtccctggaagcatatgctgcagacacttgctctgctgcagattttctgcacaacccctcctcatgggggaaggtttggtacctgaatgaggcctcttttgacctctattcctatcactatttttggtgacctcaatatttatgaaggtaataacttggtctttaatccagacaattttcacctccaggaatcttgtcctgcatctcacttttcttcttgagtcctgtggtcatcaccaaaacctgtccctccttggaaacctcagtttaagcatcccactgtccgagggtacctctttccttccattgcctcagtttcaggtgtccagtccatggcgccccccgtctttgcccagtcaccatgtccagtcgactgtgctcccatctttacccagccactgtgtccagtccatggtgcccccatctttgcccagccaccacctcgtctgactccccgtcctccccttggtgctgggctcctgcctgtccctcctctgtcaagtgcacctggacctgggagtgaccttggagtgaccttgaccctggcagctccaactctcaacccgtcagccaggctccttgaaacctggctggagggaaacggcaaaccctgccacctggagtcgcctaaaattcgcagccacggtcctccaacaggccccacgcttcccgccagtccagcacatttcctggttaatttataattctgttttcccaggcagctattttgcaatttccaggctcaacaaagcctccaacagttcttcaccttcctaattccgagctgttgcccacatttgtttattttatcaaaagaacttccgggccgggtgcagtggctcacacctgtaatcccagcactttgggagacccaggcgggtggatcacctgaggccaggtgttcgagaccagcctgaccaacatggtgaaaccccatctctaatacaaaatacacacacaaaaaattagctgggggtagtggtgggcatctgtaatcccaggtactctggagcctgagacatgagaatcgtttgaacccgggaggcggaggttgcggtgagctgaggttgcggtgagctgaggttgcgccactgcactccagcctgcacagcagagggagaccctatctaaaaacaaaacaaaacaaaacaaaatccatgttcttccagcatctgtggctgccacattccctgccctccttttaaagcagctgcaagcagctgagttcccagcctcagtggcatcaccccaggcccagcagtgagcgtggcttccatgcttttcatggagcaaagaagaaaggagcttcctggaccccgtgactctggaaccctcacgtctccatccttcccacccccaggctgtgcctgggcaccgtctccccggagagaccccgcgtgccccatctaaatcttcatcccacctctgcccccctccatgggtgctcagaccccgcatgctccatctaaatccacatcccacctctgtcccccctccgtgggtgctcagcccccacgcaccccatctaaatccgcatcccacctctgtcccattctgtgggtgctcagcccccgcatgctccatctaaactcgaatcccacctctgcccccctccgtgggtgctcagcacccccatgccccatctaaatccacatcccacctctgcccccctccgtgggtgctcagcccccacacaccccatctaaatctgcatcccacctctgtccccttctgtgggtgctcagcccccacgcaccccatctaaatctgcatcccacctctgtccccttctgtgggtgctcagcccctgcatgctccatctaaactcgaatcccacctctgcccccctccgtgggtgctcagcacccccatgccccatctaaatccacatcccacctctgcccccttctgtgggtgctcagcccccgcatgctccatctaaactcgaatcccacctccgccccactccgtgggtgctcagcccccgcatgctccatctaaactcgaatcccacctctgcgcccctccatgggtgctcagcttgccttatttttcttcagagccatgaccacttcccagcataacatgcatgtgtttctgttttatgcgtggatgtttatgttccatgagaaccaacagtgggctggtttgttcacgtttggactcaaagcctggcacatgtacatctggtgtctgtgtctggcactgcttttgaggcttgggaaaggcggataaagtctctcaatcgcatccccagtgctgagacagtccacgtacacatccacatgaggctttaagacactgatgcacttcagctgcagggcctgtcaaatccaagctcaagagagaatgatgtggtttccaagataaatgccagatacttgcttctccccacccaggactctgctgcttttatggaaatacacattgctgtgggagaggaaagagggctgaacagatcatgttgcagtgtggatatgggttttggctgataagggctgtgatcactggctcttggagctgtccccgacaaggtgtcaagggtcctgagatgctaacgtgcgtggtgaggtcggagtctctctaagatcctgcaagtgacacgggtcacattccctggggagggtcctccagaggctggtccactgggtggacgcctgtgcccccgagataggggacttctcttccaccactggcctggctcaaaggacagatgccctctggagatgtggcacttaagctaccgtgacaggggatgggtgctgacaagcagatcctagttcagattttgacacaagacggtcaggaggagcctgggccggtggggggtggtgctgaggtcagcggtggaggaacagggcgagaatcacaccagaaaacaaatgcctcgcttagcgactccacagtcctgccctcggttgactgatgattttacacattttaagaaatttcatagggttttctgtagatttgacaggtcttttcttgttggagcaggaagtaaaaatgataggactaagcaagcaaaaacagtttataaagaggagcccatgttgcggtgacattctcatcatcgctagagatgggcggcttctcagaagcgtgtcctcaccctcgggggagcagcgggcttctgattgttaaagaaccctgggctccgcatcagatctgagtgaggaatcccactgcgtggacggcaggtgaaaactgtcagtgtaaacaacctattttcatatctaggacaaaggttaagatgtgagattttcgtcttccaaggccaacttggattacttatctaacaaatcctaagattcccagactagtcggctccctaatgcatttctctaaaaattcctgaaaagaaaagagagccaaatgtttgtgtttttctggaccccccaactgaagcctgttcctgaaatgcagccttgaaaagaataggatctactttctcccttgttcctgccaagaggtcaggagtgattaattagaaacattatttgatcaaaaccacattcgttttagtaaaaagcagcaagagtttaacaacttctttcacccatcacatgcagcagaaaatcagacgagaaggatgcatttcaatgaccctggtgcaccctgggtcatcacgaggcgcaccctgggtcgtcacacacgcgtgaacacacggggggcaccctgggtcgtcacacacgcgtgaacacacggggggcaccctgggtcgtcacacacgcgtgaacacacggggggcaccctgggtcgtcacacacgcgtgaacacacggggggtgggttggattggagagttctccagcaaagctggagagtctggcagtcctggaaagtccaggcaattgtaagactgcagtcagggaagtcaggacaggcagaaaaagccacactctcgcccaggcaggcaagcagggtcaggagccgaggatgtcggagcagacgcagcctcccagggacttgtggacggtcatctgtctacaccgagccccagactgggcagctggctgttgcagggagtttgaagacctgcaggaaacccttgcctttgaataaggtacacagagagaaaatgtcctctcttccaaatacgtcttgccaaaatgcagggcaaccttgcctctctttctccagtgagggcctcgtgtactacagacttgggtttctaaatacctgacctagagtttcagatcctcactcaccgtccaacagaaacgtaacgtgagccacaggggtaccactaaattttctagatgctcagtaaaaaacacaagtgaaactaattttaataataaattttatcatcccagtatgtccaaaacatgattatatcaacttgtaatcaatataaagacatcaaggagatacttgaaattcattttttctttgaaatgtgttgtgtgtgggtcactggcagcccctctctctccagacctgcccagctctgagtgtgtaattggcacgtgtgccctggctgcgggactggatgtcatagacccagacaacttgtgcttcaaatgcaaggtacagatacatgaatttattttcatcagtcccaaacttgctcatttccttgactgcctagttttttggaattgacttcatacagcattcaacatattcttcaacaactatttcctgagggtttatgatgggctcaccactgtttcaagcactgaagatttaacaagacaaaacaaaatgaacaaaagaccaaattagaccccttctctgttcacccaggctgagaaccatatgatcatttcggagccttttcttaatcccagatttgggggagttgccggaacctgccagtccacccctctctccacctggtcccccatgcagctgctgggcctgatcctggatgctgataagagcttcctaaatgaatctcatgcaccgtaccctagaactccccccaggtggaggtctgagaggctcctcctgcccgaagaccttcaggggctccttggcactcaggatcctcccgatgtggcctagagccgctttccccagcaccgccgctccctcggcagccacttcatgctcactccacttcccctctcccactcttgcccatgcaaccaggattgccacatcgtgtctttgctcctgatgcctagaagccctggaaatatgcaaatcagatcctgctaaaatgcttctgtgaactgcagtcacctctgggtgcagccccagcttccgagctcatcgcctcccaggagtggtcctgcctcagccggaacccgtctccctctggccattcacagtgcggttctcaggggcccccgccacgtgtcctctcttctcagggacccttggttcttctgcctggagcagcccctctcaccccgcccaaccccctcccaagcccagtcagcttttgttcaccttgagcattcacctccgggcccctagatctggccattctcctgtgagcgtgttcggctcatgctgccaatccatgtccctcccagccctcatcacatgaggccctcatcacttgtgcagctgccgtttctttctggcagggtcaaaagtcgcaggacaaagaggttaggatcggggctctgccatcagaccctcctagttacgagcctcactccatcactgggagaaaaggttcccagcatttctgaacctgctcctcaagtgtcagacaacaaaatctagcctgtcaggtatatgcggtgcagtcatgagctgtctccctggaactggctcagtacatgccagttacgatctgtaatcgctcatttatctccagcacctgtgataaggcctagcatatagtaggtgctattgaatattcctaaaaaggagaatgacacccccctggttggaatacttcctggaggctggccctcggcattgggctagacctgaattcaaatcatggttctgccagttaccagcctgccatgatgggcaggccacttcacttctttgcctcacgttcttcagtaggacagccaaggtcaggcctttgcccttgcaggggtgtggggaggccactgcatgggctggagacaatgcaggtgacagtggtgtccctcatggcagagactcaagaaatatgattgaagttgttattactattcttcctcttcttcaattgctccttcaacaaatgtttccttaatctctcagccagaaagaagcacttctcatgctgagctcccgcaccctgtggcactgtctgtggtgagaacgtcattcacttaaggtgctgacttgagtccctgtgtcctccgcacgtgacctcctgaaccctttgagctgtccagggtgagaacgtggtctccctaaggtgctgacgtgagtccctgtgtcctccacatgtgacctcccgcaccctttgagctgtccagggtgagaacgtggtccctctaaggtgctgacctctgtccctgcgactccccaggtgacctcccgctccctttagagctgtccatggtgagaacgtggtccccctaaggtgcggacgtgtatccctgcatcctccccacaagatctcccacaccctttagatctgcctatggtgagaacgtggttgctctaaggtgctcatgtgtgtccctgcgtccccctcatatgacctcctgcatccatctcccacatcagatgcttgctgctggctatagcttagcttaatcatcttatcctccttggccacttaattattaagaggccactgatgaaattttgttgaatgaatataaggccactactataatcgcgccagtttatggaacaaacagaaggctgacttgaggaagagagagcactccctgtctctataggacatttcattttacttttttttttattattattatactttaagttttagggtacatgtgcacaatgtgcaggtcagttacatatgtatacatgtgccatgctggtgcactgcacccactaactcgtcatctagcattaggtatatctcccagtgctatccctcccccctccccccaccccacaacagtcctcagagtgtgatgttccccttcctgtgtccatgtgttctcattgttcaattcctacctatgagtgagaatatgcggtgtttggttttttgttcttgcgatagtttactgagaatgatgatttccaatttcatccatgtccctacaaaggacatgaactcatcattttttatggctgcatagtattccatggtgtatatgtgccacattttcttaatccagtctatcattgttggacatttgggttggttccaagtctttgctattgtgaataatgccgcaataaacatacgtgtgcaggtgtctttatagcaacatgatttatagtccattgggtatatacccagtaataggatggctgggtcaaatggtatttctagttctagatccctgaggaatcgccacactgacttccacaatggttgaactagcttacagtcccaccaacagtgtaaaagtgttcctatttctccacatccaacgttagacctaaaaccataaaaaccctagaagaaaacctaggcattaccattcaggacatatgcatgggcaaggacttcatgtctaaaacaccaaaagcaatggcaacaaaagccagaattgacaaatgggatctaattaaactaaagagcttctgcacagcaaaagaaactaccatcagagtgaacaggcaacctacaaaatgggagaaaatttttgcaacctactcatctgacaaagggctaatatccagaatctacaatgaactcaaacaaatttacaagaaaaaaacaaacaaccccatcaaaaagtgggcaaaggtcatgaacagacacttctcaaaagaagacatttatgcagccaaaaaacacatgaaaaaatgctcaccatcactggccatcagagaaatgcaaatcaaaaccacagcgagataccatctcacaccagttagaatggcaatcattaaaaagtcaggaaacaacaggtgattttacttttattaccttttttttttttttaatttctgcctttaaaacaaacccagagctttgtaataatagcaatgccttttgccttaacagctcttagggtcagtgggccgcagggtgaattcaagattcctgtgatctcaattcatctaatttctagagaatttgagcaatggctcctccagcgattcaggcctggcctcggccgtagacctgcatcccacctggcctgggggccgacgtgcagcagcaccggtgccttcccctccctcccgtgcagggctctccgctctcctcgcctggaatgataccattcctgtccttctgattacgctggcaccaggtcttctgtgaaatttgcttgataacattttaggttctggacctctcattgtgctctggcctgtaatttgccccatgatcatctgtatgtctctcagtctacaactttggatatatttatgtgcattattctggtttctttatacaaaagacacaagaaacctcttattgtgtctttttctgttttaatctaattccaggaaaaatcattgcctgcaacacagatcgaatgcgtcttcatgaaccactataaatacatgggtatgcatgtaatgttatgcctcccctcccccttctctaagcacgctgtcttctccggtgctgtctatctttttagatccatggatatacttggaatttctgaaatggaactgaaagtgtccacaagaggagaagaggctgaggggaggcagcagggaaaggggccaatctcttgggggccttagaaacaattagggagcatttttgaaaggcgtctgacttctgccacccaggaaaagagagatttgaatactagaatttggccacctagaataatttaccttactctgtcgagtgagggcaagcagctttttcctcctgttttccacaatttgtcccggctgactatacactgtgtttgtggtatgccaaagacacttatttcatcaaagtattaggaatgagtattttatccgaagaagattcctggaaagaagggacatttcggtcatctgtcttggaggttcggtgtgttcacgcgcttctccgtggtgggcagcattgcctgctctggtcctgcctgtaactctgcaccccaccctatcagccatcaccgtctcagcttaactctgcaagcaaaggaagccaggattgcagagccctccatgtaggctggtctgagaaggacagagttaaaagatcttaatacttttctcatcgttacttctcctctaggttgagctcagtctagcaaaaaaaaaaaaaaaaaaaaaaaaaaaaaaaaaaaaaaaaaaaaaaactcccctgtgtacagtgagtgtgtgtgtatctagttgagaatattttgtaattgtttgtaagatggtttacttcctgtgaagctttcactgtcatgtcacatacccagggttagcagttgttggatttgccagggacagacccagcttttgtccccgtaccatgtaatttctgctagcaccccttgcccacttaacagcatcctggtttagaaaaggattcatattttcagtctacacatgtgtctcctttaaagaacggtactaagaaattgttttttctctttcgttagcaattctaatttgttttcccaagttgctactctaaagaccaggtaccatgaaatcctaattgctttccctcaatagctgtgcacacgagaaagtaatttggaaataatggacagcgttttagtggttactgtggggaaaaagaagtgccttcatttttcagtagaacaattgtatgtgattcagtgatgtatattttctaatagcagatggcagattcaatgagagaaattgcaactcaaatcattagttaaaaaatttgtgtcactttgttagatgtggtgattgcattctaaactggaggctgaattatacactatttagttttacatatcctgtttaactcttctatatattgtttatctacatataacgattttaactgcaaaattccatgcatgtatatgttcctttcttaaatgtgtgcttccatataactacattctttaaaattctaacatctggctaaagcaatttttatgaacagaaaataatgtcactataattgacttaaaattaataggaagatcagaaatgaagaagtataaatatacaacacacctgtcaggaaagaaaataaaaaccctggggttttagaaatacaatgtaagtaagaattcttaattgtattctctttagtttagacttcagagcagacttagaattgtggaagtttagagagcgaaggacgaacagtaggaaggccagtgggcacccatgtgggtgaggctgagggtgactgggggtccctgtgatgctcagaggaagtctgtgggtcctccccccaccgagaagcagacctgctcacactgatgcctgtgcatttggaagattggagtctggtcttttgaaaacctgcccgtccacttcaaatccttttccaagaagcctgagatgacccagtactttctagatgctctttctcccaacgtgctttgagctcgcaggcgtgaacccagtgcggtgggatgggtggtgcctggatgtggctgtgggtgttggctttagcatgggtctctgcaccttgcccaaggttcacatcccaggtctgtccctcccactctcccaggccaggggaccctcactggccacaatccttccatcaatctgtcgggacccaaagcaaactgcccccactctgaagagaaaatgaaaggacggtcagcccctgccaggggacttcatgccaggacacaggacgtggccaggcatggaggcttcgtgcttgtgcctcttagctctgcccaggtgcctccacagccctaccagggcactgctgacttcgaggctgctgatgctcgatgtcttggaggcagaccttcttttatcctctcttcctcaccactatcttcctcacaaggattcgtccactaccatgcgcacagcaggggctcaaagagcgtttgttgaaggaatgggaaactgaggaatggatggttatgtgcctcactcgaggccaaggtgtttagcagccagacaggcccgggatctgatcctgactcctcggagtgccctttgcctcctgcctgcgggagcagctcagagacaccgttgatggcacggcatcaccccatctggagcagctcgatccttgggaacctgtgtcacacagcagcagctgccattctctctaactcacaggaaacttaaacaggttcacaggaaacacaactgaagaatactgaatcatctcagtgaccagtgagagacggcgcagtgcaaaccacccggggaacagtgtcacctcgcagggcctgagccgccactggggaacccttgacatagctgaggagtttcaacagaggcttggccaggcctccgctgtcctgactctgccctggtgtcctatattggtctagatggagcttgggaccacggctgccaggaaacgctcagcggggaggcggagggaaggaagggctcctgcaccagcagcacagaaaagcagcaccgatggtccagccggaggggcctcagcgaacacacggtccagctgcggggccgtctccgcagacactggctccccgcaaccaaacttctcaccagtcaacctgcccacgtgaacccagaagtctgtggttttagtaaaaggctatttgccaagttaatagtttaaaaaataccaaaaagatgaaagaagaaagaaaagaaagaaagaaaagaaggaaggaagaaagaaaaaagagaggaaggaggaaaggagggagggagggaggaaggaaggaaggaaagaaagctggaggtcttcacatggagttaaaatgtcactgtttcctaaggagtttggagaccaggcccttggacaggtaagcagatctgatttactgacactgggcccaactcctgaaatgctgacttttgaatctaaacttctgtgtgcatatatctatatgtctctatctctatctatctatctatctatctatctatctatctatctatctatgagctaaatggacaaagcacacacggcagaatcccccatttgtcttgagcctctgtggctagttcagttccccaagtgaataagttacgatttgtatgatgacctggaaggatctgagacaggagatgcgcccattagaaggcgaggcgagatggtgagagagagacacagagagacagagacagagcgggacagagatagagagacagagagaaagagagacagagacagacacacagagacagacagagagagacagggatataaagaaagagacagagacaaagagagagacagagagtcagagagagacagagatatataaggagagggacagagagagagagaggcagagacagaggcagagagagagacagtgaccaaaagagaaggtggtggcgggggagagacagagagcgagagagagagacagagagagagaactggatccagaatgtacccagtggcctccagcagcggctgcttctttgctgtttcttgcccatcgtgtggcaccagacacacagcctgtgtcatgaacccccagcctgcagaacgtgagcagcaggaggcatgtagagaggatgggcagttggggagcaatcctctctcattcccagagggagcgtggctggtttacccaacacctaacgaggtcagcaaaggttgcctctgggttctgactccgtctatttttcagcttctgattttattcttaaattctgttctgatgagctgcagaggaggaggcctttggaagtaagcatttctatattcgcacctgtctcctttttagaaattaaatgcaaccatttgtcatatcttaaaatcagtttagggtttaattggccataaatttgatcatattttgccttcatactctagacacatagaaattattttctaaagtatcatttttttttaaaaaaatgtaatactgctcaaaatactatgatattatgctcaagactttcttataaatgacgtcctaaaagaatggcagcatttggcactgcttgttttttatccctacatttttatactgccttgggacattgacaattattatttaaatcaaaaaggaaaccaaaaataattcacattgttggtcactgttttcttccttgaatatattactaaaccatgtctgggaactccattttgaaagtagcagtttctcctgacatgaaaactacatatattgatttttggcaccgagaacaagatttgttgtctcattcacatacaaacgtatatacgttaaaattaccttaaaacttcagtataatttagaagatgttaaatgcatccacttatgacatatcgatttgtgcggttttattttttaacagtatatgttgaagttgagtgtgccactatttaaaaatgtttgcggtatggtgaatatacactaggatttagctcgagactgcttttttttaagatgtactaaacacatgtgtttgctttgctgtctctcccccttggcggttgctacctgggctgattaaccacggctttctcccttttgggtcccccagcacctgcacctgcgaggtgctgggtagaatgcccagtgacagtggaggggaagcaggacgggcaggcaccatgctcaccgcacggcaggaaaggcctccctcccgagtgtgtctctaagcctggtggcttcaggatttgctgatttcttggtgaagcctcagctgaagcacagaccttttgcctcagatcatgtggcagtcttacatcatttctctcaccagagagtctcatgccccctggcctgtcacagcagtgggtgagtcaggagggcacaactatgggagaagatggggattctgacaggcaaaagaccaaagtgagtcctgctagtgcttcggaaaggcatgggggctggttattgtagtggctgggaggacggggcagataggaacccacagggacaggggggcgctggacctgagtggggacacagagagaacaccgcatgctggaaacttccaggaggatgggagcccgcatcctggaaaccggaggacttgagtgacaggtgcaggagaggctgctgctccaatcatctgagagcacagtctggccaatggggaactcagggcaaacacctgctgggctttagggtctcctgcctcccagacaaaacctgtcattgggtcttccagtttcatggaattgaattgattccatttatttattccaataaataaatatcgaatgatgtgaaagaatcagcatttctaagaataatttttaatgcactcagaattaaggtggagttaaaagaaagcccactctaaagtcttttcttgaaggccctcgcatttgaacatctgccatccagcaaaggagacacacactttactgcagagcaaaactgggatcatactgtatacttttagaagtgtaacttttgatctatttttacttttttttttttaaaaaaagcctgtatgacaggttttgtttacaatttcatgaaaatatttgcttggtgcttgatactgatactatagtttatttcaatcatgtttgtgttctgtgatattttctcattataaatttaggaagtaaaacagataaatggtgtggagttgttcaaagcaaaatcaccactgggatttgaaatgtttttctgctgcaaatgagtaagaattgtggatattgtggcagctgcagttcctgaggagctatgaagccagatacgtgggtatcaggactccctctttcatctcccctttcatttagttgcagaggtgagagtgcaggcgagcaggcaggtgagtatgcaggtgagtggacaggtgagtgtgcaggtgagtgtgcaggtgagtggacaggtgagtggacaggtgagtgtgctggtgagtgtgcaggtgaatggacaggtgagtgtgcaggtgagtggacaggtgagtaggcaggtgatatgctggtgagtggacaggtgagtggacaggtgagtatgcaggtgatatgctggtgagtgggcaggtgagtatgcaggtgagtgtgcaggcgagtaggcaggtgagtgtgctggtgagtggaaaggtgagtaggcaggtgatatgctggtgagcggacaggtgagtaggcaggtgagtgtgcaggtgagtgtgctggtgagtgtgcaggtgagtgtgctgctgagtggaaaggtgagtaggcaagtgagtgtgcaggtgagtggacaggggagtgtgcaggtgagtggacaggtgagtgtgctggtgagtgtgcaggtgagtggacaggtgagtaggcaggtgagtgtgcaggtgagtggacaggtgagtgtgcaggtgagtgtgcaggcgagtaggcaggtgagtgtgctggtgagtgtgcaggtgagtgtacaagtgagtaggcaggtgagtatgcaggtgagtgtgctggtgagaaggcaggtgagtgtgaagatgagtgaacaggtgagcttgcaggtgcgtgtgcaggtgagtgggcacctgtttatctcaggtctctacagggctgagccaggcaggcatcaggcagctatgctgtgacgccaccagcatatagaagagggaagataaaaatggctgcaggaggctcttcaggaactgacggtgggtgccctttctcgtccatctgaatgactgtgagggtgtttgttttgttttgtagcatgttggtttgtatagaagagacaagtgcccaagtcttgtcattctcacttataaaatggaaggaccacctctgcgccatgctgggctgagtactgactgggtaggatgtgggcagaacttggcataatactgagccctcagtaaatagtagataaagaagaaaataaacacaaagctttgttaagagagagggctggggaagaagggcagtgaagaggaggtcactgagtgggaggatccagagagcaggtgctgcagcctgggctccccaggggccatcctgagccaggacttcccctgcgtggacatttgctgctggtgcttctgggcccccaaatgctcctagtgctcttctgcacccacgtacagcgtttccctgcttggctcactcacacaccctactgcagcactgtaggcaggtcttttcctgcagcggtgacctttctccacatccactgcccccgagtgctcatttacatggccagagtggccccagcctgtgagagggttggcttcagcagcccaggctcctgcaggccagcgagctctcagcagaggtggagctcagaacagggctttgggcttcagttcaggaggccagtaaatgaacagaggatgcatctgctgacgtttgtttggaggcagacagtggctctgtgtgcttgtctggggtgggcctgtccctgtcactgatggggatgaggggctcagtgagccaggggaccagggctctcagctgggaaaggacagcttggatgagccccggtggggctgtcaccggcactcaactgtgctcaggttgcaactccccaccccatgtgcaccagctgtcaatggctgctgcctgggataaaagggccttcccccatttctcctcatgtcacagaagagcttggggatgtgttgagtgtggagcggaaactggtgaggccgaagtacacagcagaaagtaaaggtgccatcagcagagagccaggccggtgcctccaacaccccaccctcactctcattccgtcccctgatgtccatttcttagagaaggtgaataaaatggatcatgcagtggccacggcggcctcccccttcccctcccaggcccaggcgcactctgcacctccttgcttaggcctgaggaagagctcagtgtccttgggaggttgaggaggaaaatgctggggttctcgttatgaggttttccatgcagcaggcacccagcaggacggtgctctacccagcccctcaaggcaagatgatgggggccaggactggggcaccctgggctgcaagctcaacggggtcttgtgaggccctcctgccgcccagtgagcccgctgcagccagctcctcaactggccatagaggtcagtgacacccagtaagatggccgctgggcaggacacaagacacgtcctgctaaccctccatctgtcatgaactacatctcttaaccttttggggcctttgtttcttacattaaaacaatgacaagacctccgtgatgtccctggcattttttgaagatcaaagtgtcttatatctgaaagacctttaggaaaaaaattagatacccacacagggaatcctgaggctgcaaatcatggaaggtggcgtccttccctcccgcctcccagctgagccgtctgctgagcgaggaggagccacaagtgatgtgggccgagagcacggaacggacagcctcttacacatgcacagcatgaaggaaacagccggtttgagggcattttctcagaggacatgagtcgaacctgcatagatgatgaggtgtcaggctgggacaagggctttgagttgaagattgagaaaccggtgctgaaagcagaggggacatggcgaaaggtggagttttaggaaagagaattgggcagacgacgggagccagaggacgggttagaagtggcacaagtcttcttagactttcctggaaagcaccacagagaacagacactcctgttcccagcgttttggaggctgggtgaacagacactcctgttcccagcgttttggaggctgggtgtccaaggtcaaggtgtcggcagggctggttcctcctaaggtccctgtccttatagaccctgctgtctccctgtgtcctcacggggtcctccctctgtgcatgtctgtgtcctaacgtctgcttttataaggacaccatgcagattggagtagggtccaccctaaagacctcattttatcttaattatctctgtaaagaccccacctccaaacccagtcaactgaggtcctgggggtcagacttcaacctgtgaattcgggggacacatacagcctggaagaggcagctatttcagttacctgacataaggcaggaggggctatgttggcagagtggagaggaaagaggatttgaggggtgatctcaggatgttgagtggcactgccaggagatccaggggcagcgattcaggggctgagttgacagaaaaacagaagtcaaaagagaaaccatgggcagcaacattgtaacaggtaacagggctgcaacattgtaataggtaactcaacttcctgactcccttgtacaggttattaagctgaattggttttgtgggtgaattaagattattgatggaccagaatgaatcaatagaagtaaaaccttaataagtagtgctaattaattcacccctcatggaacggcttgcttgtgattggattttatgaacagagcaattctactgtttttgtttcttaaaaaaaaattaaaactaatatattcccctggctgctaagaagctgctataaattaaaagccagtctgctcagctcattaaaaaggtagtggctggattctgtagtctcagtgctgattatttttctgggagggaaatgcatgcttgttctggcaactcacaggtggtgatcgtggagaataatgggtcttaaagatgccaaagcagcacatttcatagcagagacatgggagaaaagtaagcagatgggcatgcagcactcagcaccagcactgccgggtcagaggggccctggagccccttcctgtttgcacacactggagacacatgcgtgcagacgctgctctgaggggctctgtgcacagccaccctctctctccctcagtcctcagcctcctccccacctgctcctgcgcctctctggccctggggtggaggagggtgggaggttcagctgggggactctgtgggatccccctgtggtcaagctccatggtttccagatggggtcacagagaccgagagagcctggcggtttggctctggccttggggcagtgccagggtcgtttctgaatcagctcaacccagtccacctgcatccctcctccactgcacattgctcaggaaacccttcctgtcagagagcccatgaagcccctcaagtcagagaggggcacctatagctgcagagcacaaagcgcatgggaggggtactccggggccatgggagggggctcagggtcactaaagggaagttcaggatccatgggagggggcccagggccactcggcgggggggtcagggtcacaggagggggcccagggtcacaggagggggctcagggccacgggagggggctcagagtcacaggagggggcccagggtcacaagaggggggtccacggtcacaggaggggggttcagggtcacaggacaggtctcagggtcactggaggagctcagggtcacaggacaggtctcagggtcacaggaggtggcttagggtcactgtagggctcagggtcaaaggagggggctcaggatcactggaggggctcagggtcacaggatgggtctcagggtcacaggatgggtctcagggtcacaggaagtggcttagggtcacaggagggggctcagagtcacaggagggggctcaggatcactggaggggctcaggggccattgcaggagggctctccctgctggacttcctgcaaatacggtagcagcagttcatgctatggttctgtggtgctggcaggagccgagaggactgagggtcccgtgaactgcaggtgggaccccagggataagcagtgctaggtctgtgtctccatccagcgatcttcggtctcaagtgggtgaggggcactgtgcaacccccgtttggagacaggtgatcatcagtctgtagtgagcggaggggcgctgtgcaccctccagttggagatggagcagctgtgtttcctgaagctttgagccctgaaacccacatccccagggtctctcaaggaaaggcccttggggacaatggctgcaaaacacattgaaggtggaggatgaggaggggcgtgtggacttcgtcaagtgcgattcagtctgctgtgtggccctggggcagcagctgcttgccctctccaagcctcagttccccttctggtcttggaggcagtgaggtgtctccaaggggctggggctgggtgacagcgggcctcaggctctgggtaggttgctggcccggggaggctcagcaggtgcagtggttgctgtccccttgggttcccatggctgattgaacagattcagtgcagttctcacgaaggaccctccaactttctccaccttgtagagccctaggcctggggtggctcagacacagcaaggaaagaagcccaggtgcgctctggtgtaaggccatccagaagctgcagtgataccctcatgcacacaggtggtgggtggaaagaagctcaggtgcatcctggtgcaaagctgtcccggaaactgcagtaataccctcatgcacacagaaggtggatggaaagaagctcaggtgcatcctggtgtaaggccatccagaagctgcagtgataccctcatgcacacaggaggtggatggaaagaagctcaggtgcatcctggtgtaaggccatccagaagctgcagtgataccctcatgcacacagaaggtggatgttgtttattgaaattagaatctgatcaggtctcctttatttggtctggtgactctatccaaaagcagtggggcttgtccccagactagcactgacgtcattgagaccagggcctccgaccagggctggcagctgtgaacgtgccaggctgtacgaaggccttgtggctgtggctggtgagggtggtgcccaggggacggtgggaaaggacggtgggtggagcgaatgtgcagccccaccatccctgccgcacacgacacacagggagcagcccaatgtgctgcatgtgagctgtgtcccccaaagtcccatgctgaagccctaacccccaggacatcagacggtgactgtatttggagatcgggatcttcaaacaggtaattaagataaaatgagatcattaggatgggcacaaatccgatctgcctggtgtccttataaaaagaggagatgaggacacagacacaaccagagggacaaccctgtgaggacacagggagaagacagtggctgcaagccatgaagagaagccttaggcagagccagccctgtggacacgctgatctcagactccagcctccaggactgtggaagcaggaaagtcagttgctccagccaccccatctgcggggcttctttcagcagacccagcaaagcaaggcggtgtgtgctgtatatcatttatacctcttcaccaccccataggatggaaatttgaacgaggtgaacttaaggggttcccagcacttcccgcagcggaacagatggcacgtgcagaggcaggagggccaggcagcaaaaaagagcaggtgacaaagcatgaagtcacactcatccctgttttgaatacacatttaaaaatattgcgttactaaaattttcttatttttctttaatgagttcatgttaattgtgacatttttaaattaaaaatataaacaacttagtttcattttatcactgcaagcgactttgaaacctgcgtgaggctttatttctaggacagacttgagcttgaacaagtcactggcagtagtgagctgggagctgtgctggtgcaaaggcagccccgcctgtgagtgctcggcttcctggggcccttggcgtgggtctggaggctcccctggcagccgtgggtgctgtcgggccgggtacccaaatccttggctgaaccactgttctccatgagctcacactgtgtaccatgttaccccaaacacacacacacacagagagaagtgtgtgcacacacatgctcatgcacactcacacagactcaggcacacattcacgccgcacacaggtacctatgtttatacacacaggtactcgtttacagacatgtcccccccatatatgcacacacacgcatatacacacacctacaaacaccaccagcacccacaggcccacactcatgcattctccctggggccctgggagagcttccccatgcgcctggtgaggctgggcgctggggtctggggtgggacacagaggaaggatgccgcagccaggggcagaggtgggcagggaccagcaagcctggcccatcagggcaggaggcaggtggatagcgagcgggatggatcaggataccacgaggtgggagagccccaggtgcccacactgcctcagtttaccctgccttccagctctgataggctggcatcctcctagcacaccgctttatatcaagtacttagagtcaggcaggtgaagatgctcagcggtcacagacctgtcatctgggaatgtcggtcacctgttcgagggcaaatacactgtttcccatgaggcttagagccctggcaaaaccacacaatgaatagaaggcacaatttacatcctcctacgattgcctgcgttagactcagccacatggttatgtgtgccgctgaatcatgtaatttctgcattttttaaagaaagatgaaaatggagaaattatagtatgcacataacagcaagttaatcatcagttggtcggaatcaagagaattgttgactatgatttgagagattgtgactcagctgtaaagagtacatgaggaaacaggcgctcaatgaaagcgatccctttctgatttgacagtcaaggggtggaagggactctaaaatactctccagtgaggcagcatgtcacagacacagagcatctcacttttctaagtgaagcagaaatacttcctaaaaaataaaataaagactccaaatctgagctagttgatttaaatatgctagtttatcatgtgagaaagaggaaggacgaacttctcaacagaaggcgaattccttggccccaactgacacctctgaggttaccgctggtgacttctcatcccaaaccctcatcacacttggtctgacttctgagtggtccagacatcctgcacaggctggccatggatgcccaggtggcattctctccccgaatctccccagacatgcctggtgtctctagcagccgctcacctttcaggactcaggggctcccttttgaagtcttgtctgttcacccagtaaacattagttatccctgttcacgaaaacagtctccactcccccaggaatgtacaacttggacgaggcagacgagcgagtcaccagttgctgaacagtgcccccgaattgtctatgctgtgtgccagatttctttcttatttttaaaaaacctttatcatggtttcaggagtacatgtacgtgtttgttgcacaggtaaatcgcgtgttgccagggtacattggtgtacagattatttcaccacccagctcatatgcaaagtggctgatagatggtttttcaatccttgccctcctcctgccctccaccatcaagcagggtgtgtattggtccttctttgtgttcatgaagtctcaacatctagcccccacttataagtgagaaaatgtggtgtttggttttctgtcctgcattagttcgcttaggataatgctatgccatatttctaaaattgtgtatatatgttggtctggcattgtaacttatctcttcacgggtctttctttctgagatgagaaaatttgtcttaaggcttttttttttttagagatttcattttatttagagcagtttgtggttctcagcaaagaaggtagagagagctcccctgtacctcctccccacaaatgcacaaccaccccgttatcaagtccacagattaagctggggcttacgcttggtgttgaaccttctatgggcttggaccggtggagagtgtcttggatccacattggaacatcacacagagcagcgtccctgccctaaaaatccgccatgctccttctgttcctccctccttccccacaagccctggccaccactggtatgttttcatagctttatgttttcagaatatacaccttataaccatttcagactgcctcattcacgtagcaacgtgcacttaagattcctccaggttcttccatggcttgatcgctcatttctctctgtgctgaatcatgcaccatcgtgcggatgaagcccagtgcttattccctcacccactgaagggcatcttggttgcctcctattctgaataaagccgctataagcatctgtgtgcaggattttgtgtggacatgtttccagctcctttgggtaaatactcagcgtggagctgctggaatacgtggtgaaaatgtttacggccctctatatcctcgccaatacactgactagaagcagggatagaacctggtctgggagaagactgctgtggggccagcagtcctcaaacgatgttcaaggtgcggggaagaagcctggaactgttgtgaggcttaaacccatcagacgttccgctcgtgggagctttccctgtgacagctacctggaagcatacacccagttccactggagctgggtttctaggaaggtgctgcctctgctggtagagaaatgtcaccatctcccccgaggacaggagctcaggcggccacgtggcctcttcactcccagagcaggaggcgcaacagtggagcctgggccctggagccacctcctgagttcccagcctggctctactccttgttagctgccaccgtgaccaggtaatgagcctgtacgtaaacctgtagaatggaacaacagtaactaccacaggggtaggtctagagtatctgatactactcacctcatggataatttttgagtattaagtgtgtgtgtgtatacctatatacatacatgtgtgtgaacatacatctggatagagctagatatagacagagaatgtatacacagcacatacagatgagagaacacactcagagtcacctgcacatacatagacatagtgcatagagagagacacagatgcacccagataggcatagagatgacttagaaatagatgtgtgtgtgtgtgtgtgtgtgtgtgtgtgtgtgtgtgtgtgtgcagagaggccaagatctcagcacgctgcccacacatgctaagtacacagtggctgttttctctgccctggaacaggaaaccatctcctcccccagaggccacttccctactcactgcggtccactgagcttggttgacactcgagctgcataaacagcacttgacttgaggtccgagcagaccttcttaatctaatcagctctaaaatacttgctgtcgagggctaacagcctcttgaagaaacttgggaccattccacgtttcatttacatgatggatgagaggcagaaatggattaagtggtagatgagcaccttgggacacaggaaaccatttggagttggagttgtctctggcccagctacttcggcagcagtgggaagtgacgtgaccctgcgttacctgctggtggcagagggagggcctcgctgcctcccatgctcagtctcagggcccctatcagcagcagccctcactggggtctgcccagcactgacccacagctggtagatccctgcgtttgactccacattttatgccttaggaagcaaaatccatcctcgtgctgccctggtttccctggcagtgtcagaagaccagaaatggccttcgaagaataaatccatgcatttttttcttgatatattttccacctttactggagatgaatgacagtcatagctacagaacgatgaccacttccattgcaattgccaccatgtttgaatgcaatgggtgcaccaagcagcaccctcagccaaacagtcagtgccagtgcatgaactcaagccacatctgctggtgtctgtggctcgaccctaacactagtgcaaatgctactcttctcaggctgctcaagctcctctcaccctccataaattcccatgagttccatgtcacagggaagcatggttttcaggaagatcaatgtcagccaggccccattcagcaccctcctcgtagtgcccttcagcactgatttcataatcatggtgcctctgctcagacccaggggctataagagcccccagctctgatgagcgtgttaatgacactacagagcagtcatgggcctgtcttggaaagccctccctggtgcatgggctgagccacttgtgtctctgtattcccagatgcatccactttgtacttgttgtcaccaatattgctctttctcctggtgactgcgatttcatctatcatcacaaagtaattgttggattaaggacgaacaatttttcaggatttcagccattgggacttcatgccatagatcaacacttgacctattctgcctccacagaggtcacatttcaatatgcagtgttcaaaatttcaccttcccagagaaaagtaaaaaatgccacatgataagaggatggcaaggggtcactgtcataaaaacagttgtagaattgtatatactgacagggcccttaatgcaaatatgatcttgagaatctacagagctttgcattttacagatagctttcaagtctgatttatcatttggtctttgcaacagccctgtgcagtgtataaagcagaatttttaagatgaagtgatgcaggcctaaaggagatgaatggcttactaaaatagataattaggtcaacaaagaactcagcccacccccaagtcagatgcttaggtatgaatctaacgaatcatgtacaagatatgaggaaaactacgaaactcgaaagaaagaaattcaagaaccaaatgagagaaattccatgttcatggataggaagactcagtatttttaagatgtcacttcttcctcacttgatttgtagattcaatatattctcaatcaaaatctgagcaagtgatgttgtggatatcaccaaactcattctaaagtttatgtggagaggcaaaaggcccagagtagccaatacaatgctgaaggagaagcaccaactggtgaaagaaaggacaaatagatcagtggaacagaatagagaacccagaaatagacccacacaaatacagggttagggttaagggttgattgttgacagagcagcaaaggtgctataataattagacatccgcaagccaaaaaatgagtccagacacaaatctaacagcttttgtaaaaattaattcaaaatgaatcacagacctaaatgtaaaatgcaaagctataaaactcctacaagatgacataggagaaaatgtagatgaccttaggtatgatgctgactttttagatacgacacccaagaaacaatccataaaaacaaaatcaataaatgggacttaatttaaaaacttgtgcacggtagaacccaacatcaagaaaatgagaatgcataccatagattaggagaaaatatataaaggacagttaaaactcaacaatagaaaaacaaacaacccaattaaaaaatgcacctaagaccttaactgataccacgccaaagaagagatacagatggcaaatcaacctatgaaaagtcgccccgtatcatatgtcactagagaacgcagataaaaacaccaatgagatgccactacacccctaatagcatggccaaaatccagaacatggacaccctggatgctggtgaggatgtggagcagcaggaactcccatcattgctggtgggaatgcaaaatagcacagcttctgtggatgacagttccatggtttctaacaaaagtaaacattgtttggtcatatgatccagcaatcgtgcttcttggcatttactcaaaggagtttaaaacttatgtccacgcaaaaacctgcacttggatggttgtaggagctttatccataactgccaaaacttggagcgaccaagaggcccttcagtgggtgaatggatacatcgtctgtggttcatccagatcatggcatattatccagctattcagtgcttgaaagaaatgagctacaaagccacaaaaagacacgggggaaatgtaagtgcatattgctaactgaaagaagaaagaccatctgaaaaggctacatcctgtaggagtccatctctaggacattctggaaaaggtgaaaatttgcagacaatgaaaagatcaggggttgccagggtttggaggagggggaggtaaacaagtggagtacatgggatttgggacagaaaaatcaccctgtatggtgctgtatactgtaatggtggatacatgccattgtacatttgtctacacccacagaatgtacaatacattctgctatggtgaaccctaatgtaaactgtgaactctgggtgggtggtggtgattgtcaatgtaggttcatcgactacaacaaaaaccccctttgatgggcagtgcggacagtgggggaggctgcgactatactggggacaggggcatggggtaactctgtactcaccactcaattatgctgtgaaccccatgaaaggaaaataaatctcaggatccccaaatcgctaagccaaagggaaaagtcgagttgggaactgcatcggacaaacctgttttccatttggttcctaaataagatcgctacaaagataaaaaaaagctacatgcttccctcgtgatttgcccacaaggaaattccctgtggacaaaggacagacagaattcaaagtcatccccctgtgcacctgagacaaacatatatctaattgcttcctctgccctattgcttatgtaacaatgcagagtcactgagccagaccaaggcttacgtgatgattcctgctctaccctcctctcacatgggaattgtgtattcggtgaaaagctacctatgacctggaagcccctgctgacctcaagttgtcctacctttctagaccaactgatgtacattttacgcagactgatattgattgatgtctcaggtctccctgaaatctataaaaccaaactgtgtctgggtgcggtgtctcacacctgtaatctcagcactttgggaggccaaggtgggcagatcacgaggtcaggagatcgagaccatcctggctaacacggtgaaaccccgtctctactaaaaatacaaaaaactggctgggtggggtggcgggcggctgtagtcccagctacttgggaggctgaggcaggagaatggtgtgaacctgggaggcggagcttgcagtgagccaagatagcgccactgcactccagcctgggtgacagagcgagactccatctcaaacaaacaaacgaacaaaaaacaaaaaacaccccaaaaccaaactgtgacctgaccaccttgggcacacgtcatcaggacctactgaggctgtgtcatgggtgcatccttaaccttggcaaaataaattttctaaattgattgagacctgtctcaggtattttctgttcacaacccccaaattattaaagtctattaacaacaaacagccacaaaaagtccaacccagttcttctgaccccagtctttggctttctactcctgcagcaactacaagaattatgaggcagcaaagggtattggctgaaggaccccgagtgcttgatctgaaagccaccaaatccagaagatgaggcacctgagagcagctggcgggatggtcgggaatggctcagcccacattttcagatgcatttgacttcacttccggaatagagtgaagcctttcttgtgggaagatcaatgcaggctggcatttcaacatggtgccaaggtcaggatctcactttcctaagtgattacctgcatctctgccccgaggggatctgctcaccttactcaatcaggtgatggttagatctttctcaacacctttttctttcaagtaaatctcaagttgctttgcccagaaaacaaggaaaaccgactccttcctacacagagaatagattcctggattctctgcgattatttaatgtcagtggaaaaacattctcattactgtagctgggaagaaaaaaatgtgttgcacaagtgtgatttctattcaggacgtagtgtgggtttgtgagtagcataaagaaatatataaaacgcctcctttattaactcgttaaaatatgaaacaataaacagaaatgaaatacaatgtaatgaaatcaatatataagttagggttgtttttaattataacttaaattaaccagggtatctccattgtgcaagaatttatttccaaaactaaaatgaagtctataaacgtgcactcaattacaccggggaattgcaaattttctgtcttctggcattcaaaagatttttgtttcattaatggctaaaatgattataaccgcttgtatactcatttcctttaccaaaggtgcttatctcctttcctgagtacacatagtttgagagtaaaattaatttgtccctaaagaattattttgacctcaaaaacaaaacaacaaaacaaaacaaaaagaacaatgatttctgacatgaaggctccagagatgtaagtcgggttctgggcgtccgggggccctttagagaccctcaggggttcctccagcaaaggggaacggctgaggttccagtcctcatccagacagaagaactcagctttgttttaaatataggactttcttgcttcccttgaaaaatgaaaaaatgtttgaaaatcactccttcagcagggtgtatgatcatggtgtaggttcggtttcagacagaagaaggtggttctgtgtgaatatggttatgcatttggtctatttgttgttttgattttttttttcataagcacttacaaagcaatataggtaagtgtggggagatagcgtgggttcccgtgagaaataatactgatctctttcttgtgcctcagctgaacaatttgaaaccaagcattttatttttttctgtgctaaacaattgatatggtttgttgtgttcccacccaaatctcatcttgaattgtagctcccataattcccacgtgttgtgggagcgacctggtgggaggtaattgaatcatgggggcggttccccctgtactattctcacggtagtgagccttatgagatctaatgattttataaggggtttcccctttctcttggctctcattctctcttgactgccgccatgtaagatgtgcctttcatcctctgccatgattgtgaggcctccctagtctcatggaactgtgagtccattaagtgtctttttctttataaattacccagtctcggttgcgtctttatcaacagctgaaagcggactaatgcaacaatactatgacaaggggaaaatgacttggctccagtaaatctttgtttgacccaatcacaggctacacactgaggccaccctggctcaaggctcacttcaagacccaccttgcaggacaagcagttctaagctcacaggtcacaccctctccccaatccctccagttgctgccctgaaacactcaccttaaagctgcccagcccaggcctgaaaccctgaacgtatcttcctctattcccattttgagataccccggatgctatgtcaaggtggttttttatctgcagcgggtccaacaagcctggatttggtgatcaacaaagcccttccttgggtttttggagcatgagcaaccaatataaggaacttgataggccaaatgatgggaatttaatgtgcagattgtcttaaacagattcccccttggtagacagagctaggtaggccagacggtgctgctgttgggaggatttgctggtgaacaatcaaacgcagaaagatggcaccaagagtcacccttctgcggctggaacatcgcctggatgaaggcagagaaaacctttctatgcctgataccgagctcggaattttggcctaaggaggagaaagtgggttcgacagccagaagtcagggaacaaaggcaggaagacagcccgaccctggatggacgccagcccctgccttggggttcacactcaattctggaggcaatggggtgtgggatctgctttgacacaaattcatgagaaaaagatgtggagagcttcgcagatgacaagatcgatacagatcaagacagagctcctgacagaggcagcatggcctccgatgcttggaggagtcggcttgaggcctggctggctttgttctgatcaggcctatccagcccagaaccacagcacagcaccctcatccacattttaaaaagctcccaaatctaaaaccctgtggctgggagacgtaacctgaagcgacctaaggctctttgtcttcttgtgtacccctcttcctctgaatattcctgtgttctcatgcacaagttactggcatggctccatcagtccactggttattatttatgtgcaccgaattccttcctttcacatcggaaagaccctggttctgaattctgccacatttgtggcgaacagatggtgggcatttttaggactgatactttcatatgggaacctacccaccttcagcctgaccgccagcctccaggggagaacgtatggtggaaaggtgcggaccctgccacggtcagggcatccatggtcggggcatccacgatcagggcatccatggtagggtgtccactgttggggcatccatggtcaaggcatccacggaggggcgtctgcggtcagggcatccatggtcggggtgtccatggtcggggtgtccatggttggggtgtccacagtggggcatccatggtcaggacatccacggtcggggcgtccatggtccaggcgtccacagtctgggcatccagctccatcagaaccatgggccccgcctctttggcctatgcttgtccatggccacccctgagttagaagcctgctggcttctgtcctcggctgcttgtcccccatcccatgtttcaggaggtttttatttttatttttcatgtatgagatggagtctcgctctgtcgcccagtctggagtgcaatggcatgatctcagctcaccacaacctccgcttcctgagttcaagcaattctccagtctcagcctcctgagtagctgggattacaggtgcctgccaccatacccggctaatttttttgtttgtaggagacaggatttcaccatattagccaggctggtctcaaactcctgacctcaggtgatgcacccgccttggcctcccaaagtgtcaagtggtttttaaatggtccttctggcttcagcaggtgctcctctgggagccaggctgtgagctgtgggctggccttgctggatttggggaatgggcctgagagagtgtccaggcccctgtgggctgtgtgaggttggcctggcttgctggcagcatcgcctccatggttgctcccagcacctccatgtcttgggtgcccatgtggtatcatcgcaaggcatagtggcgctgagcctgcacaggtcagtggccttggtgacttccatctgtgctcattttcacattttggttgtggcacccagcccattaggagcctcagattgcttggccagactgggatcagctattaataccaggaattcaggttttaattaagcatgggtgaatcaggctcaagataatagctccatatgacgaagttcattccataacgttgctggttctaatgtgaatgggttctcgttgatttttattctaaatttcatttttatgaataatatatccacatggttaaataaaaagtggaaaacacataaaaataaggcagcagttccccctcctgcccagaggcattttctctggacctggttcctcatggaggcagcaccagtgtctgtcatcgtggttcccctctggccgttagacgagaggctctgcaatgctgaccggaaaaaaccatgtgcttttgtcaggcttggagatttgcagcagtcttttcatgtatttcatgtagaggttgtaaaagttggtagcatagtcaaactcatagaaacagagagcagaagggtggttgccagagccggagagtcgtgcagggggttgctggtgtgaggtggacggtggacggtttcagggatgggaggagtgccttctggagacctgatgctcagcacgggaaacgcagtcagtaaccgtgcgtcgtctgctgcaggagctgtgatgagagagtctccagggtgctcaggttactcagtaaaaggggaactgaccacctgaggccacaggcgtgctactgagcacagatgtggaaatcgtttcacaatgtacctgtccatctaatgccacgctgggctccgcaaacaggtgcaatttctatgtgtcgattatacctcagtgaaactgttctaagaatctgtgtccgaagcctttttaattcatcctttgtggttcctcagaagaggattcctcaaccttgcctgggctggggcctcaccgggagcctggtccccaggttatggactccgcctgagtttgatgggtgtgggtgggagaagccaccctgaatccagacgcagcaccagaggcagggctgctgctgtccctgcctcggccacactgcagggctgctcggaggctccgcgagggcgtgccatccccttccttctttcctccctctcaaaaatgccccttcgtacccccacccacagctcattcccactaagcactgttaaaagggttcgctgctgagggtctacagctgcattattggcgaatgcctggacccaaaggcatcgagacagtggggctgcatttgggggcaggggtcttcatgggagcccctgagttcattctgtgcccttttgggggttgggggactgctccctgtcttcagtgtctgtgcaattcagaaagtgctctctgggtgccacttccctccacattaaatggatctctagtttccctgtctctgaatctctcttacacacagaggcgtgcacgcacacacacacacacacacgcacacactcaccaggacccccccacctgccgccgtcttgttggacgaggtggcagattgtgttatgcttgtctgacatgattccacttatgcctcccatggaaaactccttagggcagggacttggttcagcacaatttcatctattattcagcaatctctgtgtagcgctggtatcttgtaagtgataaattattataatgaaagaaaatcttcttgccagttcatcttggaaaacacaagatcgacctccggccggcatccttcacctcacccaccagcctgtggacagcggctctcaggccctcctgggcaggggttccggctctacggctgaccctggtacatgggctttttacaaccctggttttccccggattctcctgtcagggtgggatccctttagagtgaattcaagatcttgtttaggaaggtttggaagaagatgctgagagcaccagacacccaggatgggataaaatgcttttgatgacaataataagctcagatgccctcgcaagtataacaaagcccagctcctcctccgtgccacatgatcccctctgtcacccagctcccctggcccaagccacactctgtaggtctcctctctggcatggtcccctctgtcacccagcttccctcgcccaagccaccctccataggtctcctctctggcatggtcccctctgtcacccagctcccttcgcccaagccaccctccataggtctcctctctggcatggtcccctctgtcacccagctaccctcgcccaagccaccctccataggtctcctctctggcatggtcccctctgtcacccagcttccctcgcccaagccaccctccataggtctcctctctggcatggtcccctctgtcacccagctcccttcgccaaagccaccctccataggtctcctctctggcatggtcccctctgtcacccagctaccctcgcccaagccaccctccataggtctcctctctggcatggtcccctctgtcacccagcttccctcgcccaagccaccctccataggtctcctctctggcatggtcccctctgtcacccagattcactcacccaagccaccctccataggtctcttctctggcatggtcccctctgtcacccagcttccctcgcccaagccaccctccataggtttcctctctggcatggtcccctctgtcacccagcttccctcacccaagccaccctccataggtctcctctctggcatggtcccctctgtcacccagcttccctcgcccaagccaccctccataggtctcctctctggcatggtcccctctgtcacccagcttccctcacccaagccaccctccataggtctcctctctggcatggtcccctctgtcacccagcttccctcgcccacgccaccctccataggtctcctctctggcatggtcccctctgtcacccagctcccttcacccaagccacgctccatcggtctcctctctggcatggtcccctctgtcacccagctcccttcgcccaagccaccctccataggtctcctctctggcatggtcccctctgtcacccagcttccctcacccaagccaccctccataggtctcctctctggcatggtcccctctgtcacccagctcccctggcccaaaccacactctgtaggtctcctctctggcatggtcccctctgtcacccagctccccttgccctagccatgctccataggtcgcctctctggtccaacagtgtcaggtgaccatgagtgcccaatactcttgagtttatttaaatcatatgaaacatcctttaggtgactggtaattagaaatacaagcaatgacaattttttaaaatttaaattcctcaagtatggtccactgtacaccatttctgcgaagtagtaataagtgcgggcttaaagaagcagagagttctgtagtctcaagagtttagaaaagtcttctttgaattaattaatttatgatttggtttgtttttgcttataactgtggctcctcagcaatattacttctaacgtgactgcatggacaaggttgatgatgggcaactttttccaagtttatttgacttttacccttctctctcttttttcctaatacagtgcttggtagaatggtttgggggaattttataagaatgagcccttgagagtagaatttgatgatatgtgaagtgcttctacatgacatcttctgcccggcccatctcatgggattcggagagctgcaggacccataagagccatccagtcagctgcggcttgtcctcctgatgtactgacttaaaaacaagtctgtgaggccgggtgcagtggctcatgcttgtaatcccagcactttgggaggccgaggctggtagatcacgaggtcaggagttcgggaccagcctggccaacatagtgaaaccctgtctctactaaaaatacaaaaattagccaggcatggtggcgggcgcctgtaatcccagctactcgggaggctgaggcaggagaatcgcttaaaatccaggaggcagaggttgcagggacctgagatcgtgccactgcactccagcctgggtgatagagcaagactccatctcaaaagaaaatcaaaaaacaaacaaaacaacaacaacaacaaaaaccacgtctgcgtgactgcctcccggggcgaggtagcatgcctcctgtccacatagctgtaggtttctctctccatttttctcctcaggtcttctgtggtggggccattttcacctcaagtctccaagagcagggcctttccacccagtctgttggaaaggattttggcgtgggtgtttgccgtgagcagatgttgctaactcaccatcaagcggcccaatctctctgagtgggctgagcaaacaccctggctccagcacagggcctcagacagaccctttgcagtggccttagcactgagagaaacgcccactcctcgttttcttggctaagcaaggggctccttttcagaattaacagttaaagcagcttaggctgctggagcaagatcaagagcctgtgctggaggacgcttaaagagcctccagtttttcagccagtggcatgatatcaggtcctgtaagtggagactcgcagaattgcacaatccgggctcccttcctcccaccacttcgttgtatcggggcagagcaaggcttgaagatgtgtggcatacctgtggtggggtgccatccacgcatccagcacacagccgctgagcgcccactgcctcccccatctctgctggggaccagggctgtgctgcaggatctgaggaagtgcaggaagcggtctttcctcaggggcttggtggctcattcctagacctgcccgcccagcacagacaatgcagggagccaggtggcacctggggcgtggcctgaatgtcatacggaagctgaggcttgggaacggtgcacttataacatagccgaggttcctccgcatggataatctttgagctggcttttggaaaataagtaaacatttgcaaggcacagaaaaagataaaaactttgccctcagagaacagatgatgattaaattcaagaaatgcgctgaagaacagcttgcctgcatggaattcctgtgttgagaagagagggtctcagagtacagcaacagggagaccagaaagaccaactgagcacccggcagtggcatcagacagtatggtatggaggctaggcctcaccccagggcactggctaaggacgttcagaaggatcaacacatcaatacagtcagatttgtattagaaaaaatagtgtggagggcggatgtggcaggggcatctgctggtcggaaccatggctgccatcagggtcagaggctgagggccgaggctcagctgtcaccatgaggccagaccctgggattcttccctgtcctcccagtccaatgccttttccctggagccccatgcaggcactgcttgttctgcacagaccccagagagaccagagagaagtattctgcatggtgcctgtcttcacaatttctacaattcagccgagagacaaaatcctcccaggtgaaccattttaaaaacatttgtgccggtcataatggacttcaaagttggtttgtggggatccacagagatcagagcagccctaggcccagcagctttggacatctacatgttggagcctatggggagaatgagctcacttccaggaaagtaaatgtgctgtgttccacagcccgctggcctcgctcatgccttctgcactctccaggtgtgtgcttcacagacaggctgctctgcctacggctttgtggtctgtttccacttgtggccaggtctcatggacaccccttcatgacttgttcacagaaagagtgaagggggctctcttcatgctggtaaccagccaggtgcaagagctggatgactggattttgtggactgctgggttgcatatatctttaggatgattgtcttctaagaactcatattcaaaaatgacaataacatagtttgaagtggtactcaatggcaatgacatttttgacaaggaaaacagtgatgggcatcaattggaacatcatgattgtttttcttatatcccatttacttgtggggaaaaaccaacaagtttatcttgtttaggagtaaaatggctcaagtataaagaaaatcttccatgaagagggatccttttggcctccctgtaagcattactgctctataaatgatttaataacactgataatgaccatcggcagctaggagaataaagtccggcaccgggagagaaatgtcacttaacaaatattcacgtgcaaccccctgcactaagagctgagtgaagccccctggagaggccccatcaggacagaggcttgcaggagagatgcttcctggcacaggccctgatccctgcaggggctggggaggtgccgaggatggacccgctggctgagtggctgagaccaggggagcactgctcagaataggatgagggaatcggtgtcacccggccatgagccccgggacacagagcacaaccggacagaagcacctccgggaaggcctgtggggtccgtggggtctagtggggaagatggcaatgttgacgaagtggcaaagcaagggtgtcccgcagcaggagggagagtgggagcaagccaggatttactggcacccggagggtttagtcttttattccatttcccgtcactggtgcccagagtcttcttgggcaaaagggaatgggggggcttcatcgccgacttctctccacggtgggtggcagtgtgtgattgttaaagggaaagtgagcctcctgcccaggagccacgagactcaagaaagttcactagaactaccgaccacagtattaaggaattatgattatataggcacagagcatggaataattatacattatgctgatggtgcctttcttttgaagagttgtaagccttcattaaaatcttgcaaatgacagtaatgaaatgaaaataaagcctttcaagtgaagccctctgggtgtttttcttttctcttttgggggagggggatatgtgtatatagcaaaaatgaagcagatatttaggtgactatgatttttatcatctttaaggcaattcccaattgacagagtaaacagacaacctacagaataggagaaatatttgcaaactttgcatctgacatagggtcaatacccagaatctacaaggagctcaaacaactcaacagaaaaaaaataacctcattaaaaagtgggcacaggacatgagcagacattttcaaaaagagacatatgaggggccaagaaacatatgaaaaaatgcttaaccatcatcactaaccatcagagaaatgcaaattaaaaccacaatgggacatcgtctcacaccagtcagaatggcagttattaaaaagtcaatgaacaacagatgctggtgagcttgtgaagcaaagggaatgctactatgctcttggtgagaatgtaaattagtatagcttctattgaaaacagcttggagattttgcaaagaactaaaaatagaactaccattcagtccagcaatcccactactggatatctacccaaagggaaagaaatcattgtataaaaaagatgcttgccttcctttgtttattgcagcactactcataatagcagagcatggaatcaacctaagtgtccatcagcaatgcactgaataaagacaatgtggtacatatacactgtggaatactatgcagccatgaaaaagaaagaagtcatatcttttacagcaacatggatagagctggagaccattgtcctaagaaaaataactcagagcatgtatcaaatgccacatgttctgacttgtaagtaagagctaaacagtgagtacccatggatacactgagtggaaaagtagacactggaggctccacaaggcagagggcagaggtgggggcatgagctgaaatgtcacctgctgggtgccctgtttacaattccggtggtgggtgcaccgagacattccctgctgggtgccctgctcacaattccagaggtgggtgcactgggacatcccctgctgggtgccctgctcacaattccagaggtgggtgcactgagacatcccctgctgggtgccctgctcacaattccagaggtgggtgcactaaacccagactccaccactatccaatatatgcatggaagaaatctgcagctatagcccccaaatctatagaaataaaataaatgaggatcataacttaaaataacaaaagcaagtccccaccacccagccttgctcagatgcccacagtagacaaatatccgtggagaaacgggtggcgatgtggcccattgcttggaccgaaacgggtcggggatgtggcccattgcttggagtcctgatgctgagctacacacaattccggaagatcctgacagcaagcccctgagaggagaggaggaaggatccctgggcaggaggagcccacagaagatgcagaaggccccaggagagctggcgtggggacacgaaggagctggctgtctggggagctctgggtcaaagcttaagcaagccagggagagccctggccctctggtcaggaggcagactggaatccgcagacagaagcgaagggatctcccaggcagggatctcacagcctgcggcacccaggcaggaaggagtgaagcccaggggagggagcggatgcccatgaggttcccaaccggaagcccagggccgcggtgcacacctgctgtgtggctggacagaggcgcagctgccggtgtgtggtggccccaggccctcagctgttaccatgcagcccagtattgtagctcacaaccaagagtgccatgttaacgggaggactcaaaagaaatcttaattgataaattgagaaagtgtgtatgtgttttgtgagctaccagtgtatctcagacgtaaaattccagcttcccagtttatgattggcacgggccatcctccctgcagcgttgactcgcttgacaaagagtttcaggggctgagggggtggaaacaaagatggaaaggccgtggagaatctcactgttctatgaccagggactgacccagaggcttctgtttgctgagctgcaaaatgaggatgatgacgggtgaaattcatacaagaactgtacagattaagtgagaaacatgtaaagtgtgtgtcactttgacctgcaagcatgcagtgacgaccggtagctgtgaatactgccactgtcatcactatcatcatttccacgaccatctcacattatgatcctgtgtacagggaagcacgtattggaaatatgggtttggggagggtgtagtcctgaagagccgttaattaatattttaatacacattcatggtaccagaaaggacactaaatttatgtggaagatgcaaccctcccagttggactttaaatcacaacagaaagacagattgtgaagtgggtcagtgaggggtttaggaaaaaattcgcacctggcctcttaagtatcccttcctctgtctggaagcctttgtgaaactttgttttttttctctttttgagacagggtgctgctctgttgccgaggctggagtagagtacagtggtgctatcacagctcactggaacctctgcctccctaggctcaagtgattctcctacctcagcctcccaagtagctaggactccaggcatgcatcaccacacctaatttttgtattttttttctagaaatggagtttcaccatgttgccctggctggtctcaaacacttgggctccagagatctgagcacctaggcctcccaaagtgctgggattacagacatgtgccactgtgcccggcctgtgaaataatttgatgacaacaattgcttctactttttaaaaagtcatgaggactccacgtgacaatgccaggttcacctgagggtaggccacatgtggtataaatagtgcagaaatgggagtggtgggaaaagcaaatctgctggcagggagaagctgcagcctcagatgggcccattaggtgtttgcctgggatggggtgctgaggcctggctacacttagggaaactggcattggcaataccttatcccagaaactgctggccttcattgcccgggtccaatcctattgttaacacctgatagaggatggatattaagattcaagcaggaggccgggcacagtggctcacgcctataatcccaacactttgggaagctgagatggggggatcatctgaggtcaggagtttgagaccagcctggtcaacatggcgaaagccccgtctctactaaaaatacaaaaagtagctgggcgtggtggtgcgcccctgtaatcccagctactccgaagtccgagtcatgaggatcacttgaactcaggaggcggaggctgcaatgagccgaaattgcatcactgcaccccagcctgggcaacagagtgagactctgtctcaaaaaaaaaaaaaaaaaaaaaaagattcagtgttaccagaaaggacactaatttattatgtaatagctgctccgactagaaggagtcccattgatttccactctcccattcttcctatttggcagggaacttaacaacagcacatgtttgggcaaatctatgattctctgaggcccctgttccatggtgatgctaaatccctcctcccaggtgcatgtgaaaatggcattctatggtggagaggaagcagccagcacgcagctcctcaaggcagattagctggtgggagcgatgatgacggcggccgcagaagcagtgactcttgcagcagggccttgctcagtctcagaggctgatgctacgtctaattcatgagaggaagtgagctctgagtgtgaagagcctgcagtactcagacacaagttcagacaggtttgcattggccacagaccggctgctcagaacagaaagccagtttgcctgttcccgtcctctttggaacacccaactcataaagtcacagagacaccacgtgtggctcagagactcagtgggagcttccctaggtttttgtgaagcctgtgagtggtcactggagcccaggcgtcaatgaccaagtggaagataggccaggtgggcccccactggtggccatcggacagaatccaggttcggctctgcagtgtgggtctaagttaactttagtccagttttcttgccagcatgcccttctcacagtaaacggtttcctgtgccctgaaggaatctccccatctcagccttgccaaatgcattcaattttcctgtaacaacatgatttaaagcctactttaaaaaataaacaccgatcttagctattgtgtcttagccagagagctggcctcacaggaaaaaggctcatgtctgttccttttgcatgaaacttggcatgctgtacacacgttagaaacatgtgctgagctgatgagcagctcaccaaaaagaaccacaaagctgatcggtgtccaaggaacgttggtgggagagacgatgtgctcctgacgacagccacctgctcccccgaaagccagcatcagccgctgcggtctgtgctccggggtacttccatgcatctttcaaagaaatctttaggaacagttgtcactgcaatccttgtgggtcacagtgagaaaagttcagtttcaatagaaaactaagccacagataaaacaaagcaaaagcaaaagcattgaatgtgagggggtcccattccctttgtggaaacccaggactcagcagaattcatggacgttcttagtagagtcagccatcactacagcaagttctccctcagagatggactcttggaagccactggcaggagggctcatgggaaccggtgcgtgttgggtgctgtgtgcaaacggagcagggacaggctcagagggcctgaagctggcggggaagtcgctaccctaccacccagcgatggctggctgtcctgcagtgggttctgctgactccacacgggggactgactcccagagaccctgatgtggactttcaaactggcacctgctgaatgcacaccacgggtggtcaggccagtagggtggaggagccgcttcccgaggttccttctgtgcctgcagaggcctgagagccaggtccactctgctttcaatgccacttttgagcgcgttgtgttttcccagcgtctccctccccacatcagcaattcctcacaccacgctgagggaagaatggctcccgatgacaggcctcccaaggaatggaggaggggaagcgtgatttttctcctttcctcatccctccggcatccatcgactctccatgataaatgaggagggcacgacttcttttgtcattggagaaactgactccacattgcacagccagggagaggctatcctggctatttcctcaagaatgaaccttgatggtggctgtgcagatacacacacacatccacatacatatgcacacacacctgtacatacacatccacacacatatgcacacacacctgtacatacacacatccacacacatatgcacacacacctgtacatacagacacacaacacacacacacctgtacatacacacacatccacatacatccacacacatatgcatacacacctgtacatccacacacatatgcacatctgtacatacacacacctctacatacacacatacacatatcaacacacacacacttgtacatacacatatgaacacacacctgtatatacatagatgcacatcatgcgcacacctgtacacacatgcacacacagacacacatcaacacgtgcacacacaccaacacacacaactgtacacacacatacacacatcaatataaacacacacgcacacacacctatacatacacacaacacagacacctgtacacacatacacacatcaacacacacacctatacacacacacctatacacacataaacacacacacacctgtacacacattaacacacacacacctgtacacacattcacacatgtggccggggtggagctgggatgaggaagatggattcttcggacaattggtaggcagcacccccggatgacagcagggctgtgtcagggacggccatggctatggctcttcctggtgccgcattgacaagggccaggaagcagcaccggcttggagcccgaccctggtagtcgctccgctctaaggacctttgcacctcgaggtcctgagtagggccagccctgctacctggacagagatgaggatcacaggactgaagatttctgcttgtgaaaaggatgtcccctaacctcctacccatagcgtctgaaatcaccctgattagaacgatttccttggccgaaggaaggcctgagtgtcaccgagagagcacgaggtgcccagtgccatggaggttctctctacgctgccagttgcacttttgtggtttatgtgacagctcacagtatgtacagtggtcataagtcacagtcacatacaattttagagctgtgatcttttttttttttttaccattttcaaattttatcgtaaaaaatggagtcctaaaaatttgataatttgcttaggcacaaactgtagtattaatatacagtcatatatattttatttatttatttattttgagacagagttttactctgtctccaggctgtaatgcagtggtgtgatctcagctcactgcaacctctctgcctcctgggttcaagcgattctcctgcctcagcctcctgagtagctgggattacaggtgcacaccatcatgcctgactaatttttgtatttttagtaaagatggggtttcactatgttggccaggctggtctcaaactcctgacctcaagtgatccacccacctcggcctcccaaagtgctgggattacaggcatgagccactgcctctggccaatattttatatctatctatctatctagtcaatactcagtcatcaatcagcatttactatgaatttttcagaaaaatatatttttttcagctactacagaacccagataaattctagctctcaaggaatggccttataaagtataaacaataaacagtattttctccagaagttagtgaatgtcagagccttttttgcattatctcattttaatctttacaagaattatttgatgtcgacccgacgttgactgtttctagaagaaactgatgttgaaggcgtgggtgtggcttccctgtgatctccaggctgggaacaggcaggaagattcgacccagatccctagagccctgggtcagcccttcctggaaagggagagggagtggatggagaattactccagggagaggccaggcactgttttgtttgcactgccacggtttacgttttcacaccacaatcagaaatactgtagcacaatttaggggtaaaatacaaagagcctggttttgtagtgttttgaatcttacatctgctgtatattctctttactgttaacaccaaaaggaaagagctgctgtgaatctattacctgtaaccggtccttgtctcctctaagcctgttcctcctcaacgcatgagaacgttacaatgagttcatgcatcaactatagtgtctggtgtattttatttggttctagattcaaggggcacccaaccacttctcgtggtaagtttggtgaggacgtctgtgtgcatgaagctctgagcaatactacaagtgtctcccaattttatcatttctgctatgacggagatgcatactatagccaaaactcagaaaagagataaaaagggcaaactcttatggtcagagaactcaaaaggcacattttccatgcaattatttttgtaacagcagaataaacccatttatctaatagagttatagtaataaatagtatattcaatttttcgtagggatgatggaaatgtcatctacataaagccagaccgaaaaagctgttttcaaacagaccctcagggcagaatccatggttcaggtgagtcctcccttccttctcttcttctggctggcaagccatgccttctctttgtggcctcagtgggtccctgagcgcctcgttccttcagcctggggtttacagggaacccctgagggtttgctggtcactgatgcaatcaggttcttgtgattccacgcagctcttactgtgacaatgtcaccttcccgtctctcagaggcattgcccagggagcgaggtgggcctggagaccactggtgcccttctttccttgccaatctctgattctggattgaatgggtatgaatggtctcctctgagaagcctggatttaggattcagtaaaaagtccagggtgaccatttcctactgcacttgcacttataattctacttgtaacttatttttaatatatgtagtttctattgggataaggaaaatgcacttacttattcaagtcctagtaagttgctttttataactattttcttaaaaagtaagtacccaacctacagctactattgcctgaggaggcaaaacattttggatatataaagagggcccttacctttgaaaagaaatgaaatttctgctttagatgtctcaataacaggaagagtgatgcaaaagggcttcaacgtatattggcttagaatatgaatttatggacaacttagagaacgttaagaggactagcagcccattatctggcaaatgaatgtctaaagtcaatgattggaatgaaataaaatattgattttcatgacaaaatgtccatagaacaatcagtttgggtgaacagctgcacagttctggaatttaaacattcaaacagtctagtgatcacgatgtttaccaatcaatttgttagtgatttagtttaaaggatggcatttacaatatgtatatttctttcacgtgaaaattacacgcaattcaagatcattcccgttggtgattcctgggctgggtttcaggttctccatgtctcttcccccgctccttcctttcctgttgcccaagtttgggcatgcagctggtgtcccagcacctttctgggggcctacagtcttcaccctatggcactagttctcgaagttctcctcacatggggcttagaagtgcaaagtcaagccccagcccagactctctgagctggaaacctgagcgggggggagcatcctggctgtgcctggcaagctcccaggtaaccctggacacacctggtgaggagtgtgaaagaatgctctctacgcaagcaggtgagagccctgcttcacagcccaaggaagggacgtgggaaaggtttagggcctgcaagagacaatatgcctttcagacagaggctgattggcaaaacatgcaatgagatgaatccatcaagcctgtgtccatcccaagtccgaaggagaccacgagagagccagctagagtcccacaggtggtcaagagggaagaaaaggtgcagggaagggatgatttctttctggccggaagttctttctctaagcaagcaggtttagcggtagtagaagggactctatgggagtgtgggttggggcacttggagagctgacaggctcctgcacagactgaacaggagacacactgggctggtacctgcttcctgcacggggaacagaagccattgaagccagggcccattgagtcaacaacaagtgtgtgtcaggcaaactaaacctgaggttcacattaccccagtgaaacggcctgtgctgttgtgccattttgtactgattttgtccatccatgacagaatgtggggcaaatagaccagtaattcaggcaaagaatgaagaattccaccatctacttaaactgccaaaaggagtgaggatttttaacaacaacaaaaacaaagcaaaaaatataatgtctaatctggacaggtaacaatatacacgttttgaaatgtctataattcaacaacaaatatgaaatgtaatccatttcagttaggccttttaactttgataaataaaatgaaactttgaattttcttctcgcaagtggctgatccctaactctggtgggcagaagttgggcttcccctggccgaggtctccgagggctgagctgcccctcttcctccattcatgaacgattcaccacgtccatcagaggctagagaggacccggttctctgtcacttgttagtaatgctaggccatttaggctgggacagaggtctgaaggaccctgaaactctggagtcacagaaatatagtccacgctctgtgtcccaagacctaacctcggctctgaagtttctcatcacctaatgctgtgatctgcagctgagacacacgtttgagccacaggctgctgtcctgcttgagaaatgatgatgaccacatcccagacaccaggcaccagctaccgaagccctattcacctgcagacatggagggacgccctgacccaggagctctgcatcagtgccattcactcctccagtaaagtacgagagctcgttgatgctgacacgatgggaaccctagggaccctgcccgcagcgacatgcatagaatcatgactccaggcaggggacgtcacacggctgacttctgactccaggaggcatccgcccagtgcctctggacctgcctggggctccagccatcacccacactggacatgacgcggctgacctctgtgggcttagggcatggtcctccaggcctcgcatgaactttaagtggaaaagtggcttctaataggtaagtagtggttgtttttaacatggctcccagcttgataatttcagagactgctgtctacccatcacaccccacacaacagtgtgcaagggcaatgcaatatagccctgtcccatggggggccaagaccacagcatccactggaaactgacgtaggtttcagggggattctgaaagaagggtaaaacacaacttctggcatcatctatttatcatcttgttcatgaaacaagatccatgcaaatggaaagtgatttgacatagtataaaagtctgtgccaacgtctggagcggggtttggaaagtccataagatattaaaggaggaaaaggtattttgagatgaccttttgcatttgcctcacagtttatttcctggatttatgctcaccgggtccctcagtcccagaggtcatggagacgcagcgtgcctgtgctgctgctgagatgtttgtccaagagaatttaaatcgtcaccagcggcaggaaatagtgagtgtgcagtgcatgaaagaactctaccactctatcttcggggaccattgacagacgggaggaaggaaggggatgagaggagggaaggaaggaaaaaaggaagaaaaggggaaaagaagggagaaagagaaggaaggagaatggaggaaggaaagtgggaaggaagagaaagaaagacagaaggagggaaggagagaggaaggaaaaaaggaatgaggaaggaagaaaggaagaaaaaagagaaatgaagggagggagggaaggagggaggacgagaaggaagaaaaaatggaaggaggaggaaaaagtaagaaagaaaaaggaaggaaggaaagaaaaaagtaagaaagaaagagaagaaagaaggaaggaaggaaagaaagagaaagagaaagaaagaaagaaagaaagaaaagcaagggagggaggaggaaggaaggagagaaggaagtctgggagggaggggagatgggggtagggacagcatttccctccgcattgccggccctctgtcttgagcccctgcagggtgccggatggccatgccctattgtgcgtccctcttgcagcaacaccacattaaaccgtggcatcctcttgaggctgcccctgcggattgcacggctaatgcagaaggctagaaagaaggacccgaaacgcccaccaaactataaattaaggcgaagatctcaggagcaatgtgcctggtgcccggcgtcgctggcctttggtcccctttcagggagcctgaccctgctcccagagacgcttttcggattcgctcagctcacaggcgggatgggaatgtgccgcagggctgctgcctcacacgtccgggtttaatagacttttttccactgataaaagaccactaatgagttcattttcaagctattaaacgggctataatagctagttctcctgatgattgcacagagacccgctggtcacagcgggtttgtctccctgattaactctttgctgccctggtgccaggaggctgcgtgcctgggaaggcggcacccccacctgccagccctgtctgcccctgtctcctgctttcaggttctcagggccaagaagcctcctggcccgaggacccacaaatctgctctcctgcatgcatccaacagctgccatctcttcccttatgagaaaccttcggtcctaagccagggcatcagctgactggttgcacagagggtgtttcaatattcacatttcacatgagggactgcgtgctctcttaactgtgtgtctgtaatcctgaaagaacaccctaggaagacgcttcccttggggacactcttttatcaacacagggagcacatgggcggggctttaacccacacactgggctctactgggcccgggtgagctgtgtggctgcaaagagtgtgtcgccctgtgtctgtggtcatgaccacgcgtagcgttagcaaatcacctctccaggtgtctggtttaaacacccttctccagcatcggagggcaggtgatgaatagcagggcgctgacagtccccgtctgccctcttcattaggattgcagcaggccgacttcagatgcttctgcttagcataattttgttttcagctatttaagcaaaggtgcccagagaccttcaagcttgggcagccaccagctgaattggattgctgcatttttttttttattattactgcctgttttcctttttaagattgttttattatgagaggcccaataggtcagagatgttaaattgcacagtgataaatgctcctaggccccctccagcctgttctcaggatccttccagaatcaccgtgggctccctgcctccctgcagccccagggcccctacacgggcagttctgctgctcgcctccagcctctgcacaaggtgctggctgggaacccaggtgcagtctcaacgatacgatatgtccacaggcccctttctcctagcccagaccccaagttaagggccagaaacaggctttgctcccctctgtccccacactcagtgatgaacattgcatctatgtctttgcaaagacagaaaaagggataattttcagtaactagcactacttttctgggtaaaacaagtggacagaaagaaaagcactaggcactggggcctgtaaacctgagtcattgatgtggggtcgggacaggtgcctgccggggtcctcatccagcaccagctgctgagccgggaataaggggcttcctcgtcagagccctcgtctagggacttgctgggccacagatgcctctccatccggggtcttttagtttgtgtcccggcatttcacaaggtcataaggccaagcaagaatgctttaagcaggactgttcatggagatgggcaggcgcacacacacacacacacacacatgcacagacacacatgtgcacaggcacatgcacacatacagacacatacagacacagacatgcacacacaaagactcgcagacacacccatacatacacatacaaacacacatagacatgtaaatgcacacacacagactcacacacacacatgaggtgggggctttaactcatgaattttggggacctattcagcccataaaatgtccaccaaattgtacattagtggtaggaaatacatatggtccatacgacgacatcaacgttacaagcctttactttccagtcactggtgccgcgtgtctgcaagtagtcctaaacctccccaaacatacaaagggcaagggagggggaggaaaccttccccgtggacccggctttccccagaaaggctgaggagtgtcacaggctgagggctgggggctctctcaggcccgttttggaggcgcggagtgaatgcatcttccagcggccgatctttcttcttctcctggaccttcagtgtgcccaaggcccataaatcagcgtgtgctgctgaaatctgtaatactcagttcctctctcaacttactctcagaacaaataatttaagacactaagacagtggcagtatatctgatccaagggggaaattcactctcatttcgttggaaagcagctgcctggatgaaattctctctccaataattgattttctccctcttgctgcttcactcgctggagctccccattccccaaatgctggggaggtggggggtctcgtgggatgagaactcggctctccccctccactcacatccttaatgcatcttggcctcttcctccctccttgggaacagggcacggtgcccccattgatgttcctaatacgggaacatgacacatacattaggctgaaggaaaggaggaaaaaacatttttgccttgttgtaatttcagcccagaagtagcggattcatttcacacgaccttagctcaaggtgacttgatatatcgtcccagcgatgagattttttttgtgtctctcttatccacccatctccttctgaaggaaactcttgcagcagtgaaaaaagatggacagacagagccctgggcaaccctggaccatgcaccccagatgcgtggtgcctgggggtgcagctggggcctcttcccgcccccacctgcccttgtctgtttctttctgtttcaccccgtgtgagcaaggagaccggtcttcagaatcacaaggaattaggcagaactcatctcccagcgctggggggcacgatgaggtgggttcgggccgaccagggagattggaggggatctttccagctggcaggtcctgtgactcggttcctccccagggctgagccgagggggccgcctctcccacagctcatcagccattaagagaaattcagaagaggctggggtcctcgtctttttctgagttgtgaggaggggccgcgtccttgtgcttctgcaccaagcacgaatctgccctgcaggagggaatgggcgtgttcctcaaatagaacacgggaagccaggaggaaagagcagagcggccatggccgccctccccagccaggacccgaggcctgagctccagagggaggggctggacataaggaggcggtcacaacgccggtgggtcaagcctattagaaagcagcaggtggtcatgaaatgttgttgaaacagaggctaagacagggctagcaattgttctgtagatagtacacattcctaatattactcatcttcccaactctgaggcagcctctattattgtccttgtttataggtgagaaaattagggttgaaagtcattaaataacgtgtccaaatcacctgccagtgatagagccaatatcgcagccctgtgtgttgcctgaggctcttctcttgaaccagaggtcagcaaactatggcccttgagctggatccagccagcagcctgcatatcttgttatttatttgtttatttggcatccatgaggtaacaatggtttttatttataagggctacgttgtataagcaggtacataatatcctcgttttgcctcttgctctgcaaaacctaagctactcactatctgatcttgaggataagtgtgcagagccctatcttaaactattgggttgtagtgattagtagctgaaataaatgttattttaaattatagtgtctgaagttttgatgaaagctgttgataatgggttgtgaacaagttaacacttccgtttacttctagagttacagcccacatgaattgaatgacttctagtgggcgtaacagagcttcagaattgtaaaggctctgatggacagctccccggcatctgtctgacagagataaaagtaaactttactgttaccctaacgtctccagagtaagatctgtggaaggagaaatgtacaaagaaaggcgtttacttacaggaagcaacatggttctcagaatgcctttggggcaaaacaagcattagccatgcctgaaatgtgtgtcttgtgtggtcagttgaatgtcttcaaacccattccatgaaaagattttttttaagcaaaaatataaatatcatgattcttcaatggcatgtctttataatttttcctactacttcttgtcgttaccatttcaaggacaacatccatgagacattcttcagtcctcaggattacctgtgatttcaaagcgaatttgaaaatccaccccagcagcagggtggggtaactgtgcagagtttccagcaactcatgcagccacccaaaacaaaaggagtatacagcagatgctcattttcgtgaatgcagagctgagtaaactattagcacgtcagtgtatccaggtttacatgctgtaatcgtgttcacccatgagctgggattttcctggaagttatcttttggtagagtcttcaaaggtggagttgaatagacatgtttcttattagctggtttctgctactttatgattagaacacgatgcctttatgtacaaagctaataatggagataaggctggatggtgagccgaaagcccgcagctctgcacctgagagcagcaagccagtggttaaatgtgcgcgggaagcacggggaaattcaaggagtttatttctccaggctttccaatttgattactatagagtacaaagctattaaaaatatgacctttgtattttttataccttggcaaaaagccagataataactttgtttgacttggttagtgtgatagagtgcttattcagatggaaataaaatgacttttctttactggaaattataccttgaagtctaaatgtccatcactgatacaacacacagacagcctgaaaaccaccgaggctgttaaagagaagaatgcagcatttccattttctcaaaggaaaaatttatatttttgtacagatgtcatcaacttaacatggtaaaaggtaaatctattgtttcaatacaaaagttaaaaaaattgattacattaacagaacatcaatgtttattacagctttaaaaagcaaaatagatactgttctctccttaaaacattgttttctcattggaacttttaaactaggcaaagcaaaaacatttggctacatcagcctgggttttaatttgaattttaaagaatacagaaaaagcaatgattttatttatctaaattaaggatcaatttctgaaagttcaccaaacatgggagatgttgctctcagggtttataacgagtgaaataaaaagcagattttgttgatgagttcccatcccatacagaaaaataggttccctcaatgagtattagcagagagagggtgtgtctgtttcaggacttagtaagaattttagaaaaaaatgccctttttggctgggcatggtggcttacgcctgtcatcccagcactttgggaggccgaggcgggcggatcacgagttcaggagattgagaccatcctggctaacacggtgaaaccccgtctctactaaagatacaaaaaattagccgggtgtggtggcgggcacctgtagtcccagctactcgggaggctgaggcaggagaatggcgtgaacctgggaggcggagcttgcagtgagctgagatcgcgccagtgcactccagtatgggtgacagagcgagactctgactcaaaaaaaaataataaaatgccctttttgttttgggtttaggaacataaactggtctcaggggtttatggctctttcttctcattgttggggaggagctcatgggccctgggtacacctcggtctactgagaagtgtatgtgttggattggtaaaaaacagcaaacaaagttacttctgtctgaggcctgaagttttaaatttttatttttttgctattagaaaataatgacaaaaattacaatagtgagaacagggtatgaaggaaagttctagaatggtcagcaggtgcactgcttagtggtctgtctgcctccaggttcactctccactgcctgccccaccttggagccaatgccatggccttgccttcccgccctgccatgctgtgctcacagcagccttccagattgaagtgtgcctgcccctccccagagaagctgggcatcccctccagcccatgctggggaggcagcacagccctggatgtggcccaggactcactgccatcgccagttacccaccacccagaggcccaggatgcgcggtatggtggatgtgtcagggtgcacagctgtccgggtggggcattgtccacccgggagagtgtgtcttacaccaagtccgatgcatgccatttccctcagtcagaaggcacagaacgcacagactcgaatgggaattgggctctcccactgacaacctcactggaaggatgtgtttcttccacccccaggacttgggtatgctggatttggagatgtagtgagcaaaggaggttttcctctactggagaagatggccatgcttctgtaagaaggaggctgaggctgttcccaggacactttcacctctccagtgttgacaccacttggcagggcagggactgttgtcctgaataccacagtccctcccttcggaaagtgggtgctcctacccagtggggcagcaacactgtgttgtaaacacgccgaattcaccagcctatgatgttcattgcatttgtcaatgggaaactgtgacccctaaataaggagaaagccactgaaaattggattctactagaaggcagattcagatcaccccacctgtcaaaccagcagaggagatggcaaagtggatcatccattttacaatgctggtggcagggggaggctggaattctatatttaggctttgtgccctccttcagaagtgaggaatatggcagctgtgttttatgttgactaattatactttttctcccatttttcttgccaccacataggaagggcattgatggtggcttgcatttctatagagggtcccagtgggagtgtaactggattgaaatcatcattcaaaactactgctgctagaactttgtatttctcttctgttgggaacttgaatgtttcatcgagaaaaaaaagaaaaacgaggatcagaaccagcaagtagtgctagatgtctgtgtgcccctccagacacactctaccctgagctgctgagctctgcatcctgggaactggcctcagagggttgcattctgtcgctagatgtttgtgtgcccgtccagacacactccacaccaccctgctgagctctgcatcctgggaactggcctcagagggttgcattctgtcgctagatgtttgtgtgcccgtccagacacactccgcaccaccctgctgtgctctgcatcctgggaactggcctcagagggttgcattctgtcgctagatgtttgtgtgcccgtccagacacactccgcaccaccctgctgagctctgcatcctgggaactggcctcagagggctgcattctgttgctagatgtttgtgtgcccgtccagacacactccacactgccctgctgagctctgcatcctgggaactggcctcagagggctgcattctgttgctagatgtttgtgtgcctctccagacacactccacaccgccctgctgtgctctgcatcctgggaactggcctcagacggttgcattctgttgctagatgtttgtgtgcccgtccagacacactccgcaccaccctgctgtgctctgcatcctgggaactgacctcagagggttacattctgtcgctagatgtttgtgtgcccgtccagacacactccacaccgccctgctgtgctctgcctcctgggaactgacctcagagggttacattctgtcgctagatgtttgtgtgcccgtcctgcccgtccagacacactctgcactgccctgctgagctctgcatcctgggaactggcctcagagggctgcattctgttgctagatgtttgtgtgcccgtccagacacactccacaccgccctgctgtgctctgcatcctgggaactggcctcagagggctgcattctgttgctagatgtttgtgtgcccgtccagacacactccacaccgccctgctgagctctgcatcctgggaaccggcctcagagggctgcattctgtcgctagatgtttgtgtgcccgtccagacacactccgcaccaccctgctgagctctgcctcatgggaactgacctcagagggttgcattctgtcgctagatgtttgtgtgcccgtccagacacactccacaccgccctgctgtgctctgcctcctgggaactgacctcagagggttacattctgtcgctagatgtttgtgtgcctctccagacacactctgcactgccctgctgagctctgcatcctgggaactggcgtcagagggctgcattctgttgctagatgtttgtgtgcccgtccagacacactccacaccgccctgctgtgctctgcatcctgggaactggcctcagagggttgcattctgtcgctagatgtttgtttgcctgtgcagacacactccacaccaccctgctgagctctgcatcctgggaactggcctcagagggttttgcattctgttggtttcagtgatagggagggaggctcaagggttagttttccttccagtctgtttgacagttgctgtgtttctcttaagctcaaaacttttgttggacggctcttcccctccaactacagatttccctgagttcagtgaattgctgtccacttttttcccctaaggctgcatctccccgggagcttcatcatgccctttagtttctgtgacattctctgcacctttaagacgacttcctttattaaatttcttacttaaccctctgagtgtgccatctgctgcctgcccaaacaggtgtacctaagttccagcctttactctaacagaatgcctttaggtgagtcacagaattgctctgtaaattagaagagcaggcttgtttatgaacttttcttatttaagatcctataagtccagctttactttaaaaaatccaccaccatgactataacctctttactgccattcaacaaccccaaattataactgtttagtggatattgtaaaagtatgtatagcttatcacctttttaataagtccaataatgcttcaaacttaagatgaatgagaagattctaccaaccctgaaaattcacatacctatagaaaattctgattattcaaccataagacacttcataataatttgcaaaagtaatttttactttcaacaagtcattttttttgttcaagtacagtgtcactaggtttaaaaatcagatttttttttgagagagggtcttgcacttcacatatgctggagtgcagtggcccaatattggctgactgcaacctccatccctggggctcaggtgatgctcccctctcaggctcccaaaagtcagatcttaagtggtgccacctagcaagtttgaggtagttaaaaatctgtgacgtggtaatcgacagtttctcaatgaattaaatacaaataaaagagtattgttttgttggagagatcattgtggcaggctcaacaacaaaaacattaaagccactaaaaacaaatcacaggcgagatttccagcaatggccatttgaagagaaaattaaaccctctcctccaaaagcaactatacagctgaaacccctgccccctgcagcttgtagaagttctgtcagattaaggcaggctgcgaaggaactgtagcttcttggctgcaattaatggatcacctggcttggaggaatgaatggtgtaaaataatcaacagaggagttaaagtgatacactcagttattcaggaagagattgagaaggcgagagacatgtggaaaataaattgcaaaatggtaaatgtaaatccagccatatcattagttgcattaaatatgaatggtctaaacacccaaataaaaagagcagagatcatcagattagataaataagtaagatttagctacatgctgtctacaagatacattttagaatcaaagacacaaatacattgaaagtaaaaaaaaaaaaaaaaaaagaaaaaatacgcaccatacaatgactctaaaaaaactacatttgctgtattatttattgatagaacaattaggtggaaaattaaatgacagtattaatcaactcaatctatttaacaaaaataagcacttcatgtaataactgcagaacatgtatttttgttttttcagagtctcgctctgtcaccaggctggagtgcagtggtgcgatcttggctcactgcaacctccacctcccaggttcaagcaattctcctgtctcagcctcccaagtagctgggattacaggggtatgccaccatgcccagctaatttttatatttttagtagagatggggtttcaccatgttggccaggagggtctcaatatcttgacctagagatctgcccatattggcctcccaaagtgctgggattacaggcatgagccaccattccctgcccacatattgtttttaaggacaagaaacattttacgaatagataatatgctagattagaaaaaaaatcaatacatttaatagaactggcatcatataatgatgtttttgaccacaatgaaagtaaatcagaattgaacaacagaaagaaatctggaaaatctgcaaatatttagaaattaaacaatatacttctaaataacccatggatcaataaaggaaaaacaagaaaaataagaaaaaaatttaactgcactaaaacaaaattatattaaaatttatggggtgcaactaagacagtagagggaaatttatagctttaaacacctatatcagaaagaaaggaagatctcaaatcaatattctaagcttccatgtgaatatagtagaaaaataagagcaaactaaaatcaaagtaagacataataaagattagagcaaaaatccatgaaatagaaaaccaaaaaaatcaacaaattgacatatttagattgaccgaccagtaataaaagacagaagacacaaattatgaaaattagaaatgaaagaagaaacattatcaccaatctacaaaaattaaaggggtcataagcacatgttatgggcaactttatggcccaaatgaggcaacttagatgagatgggggaaattactggaaatgcgcagatttccaaaaatgactaaagaggaaataaaaaaactacaaaaataacaattaagaaaattaaactaacaattagagatccctttacacaagaaaaggcccaggcccaaatggtgtcactggtgaatttgttaaataaagaaaaaatactaacaatcttttacaaactgttctagaaaatgcagaaggggagacgactctccattcattcagttgttctaatattatattgatagcaagcacaaaaatatcacaaaaagtatagcccaagatttcttatgaatatggatgtgaaactattaacacaacatcacctaactgaatcaagcaccatatgaaaagggtgtatgtaaagaccaagttagatttacgcctacagtgaaaagttggcctaaaatgtaaaaatcacctagtgtaatatactatattaatcaaataaagatcagacacctgattatcacaatacatgcagaaaaaagtattggaaaaatccagtactcattcatgacaaactcccttaacaactctgagtacaatggaacttctgcaagctataaaagggcatatatgaatcactcatgcccagctccatccttagtcatgagtggctgagtgctttcctgtagatcagggacaagggaaggatgtctactttcacacttgaattcaacagtatactgctggtccttgcaagtatgagaacaaaacaaacaaaataaacaaacatgccaatcattcaaggcatccagcataggaaatattaaaatgtattcatttgtagatgacatgaacatctatgtagaaaatctgatagaatcaacaaaaaatatattagaactagtaggtattttagcaagattgcaggacatatgattagtataaacatatcaatcgtctttttatatattactaacaatctgaaaagaaaaacaagaacattgttacatttacaagagcctcaaaaataaataactaggaatagtttcttctttttctttttctttctttctttttttttttttgagacagggtctcactctgccacttgggctggagagcagtggcatgatcacagctcactgcagcctcggcctcccaggctcgagtggttctcctgcctcagcctctggaattgctgggacagcaggcacatgccaccacatccagctagtttttgtattacttgtagagatgagttttcactgtgttaggaacacacttaacagcaacaacaacaacagtgaaatgcaagacttgtgtactgaaaactacaaaacattactgaaagaaatcaaaggagacctaagtaaatagggagaaattccatgtttctggatttaaagactcagtaatgtcaagatgtcaagataacaattcatcccaaattatccatggattcaatgcaatctctgccaaatctcaaatcccaggattttttttgtagagaatgtcaagctcctcttaaaatatgtatgaaaataaaatgcaaaggatctaatagtaaaaaacaattttgcaaaaaaataaagaaagaaaaaggttggaaaacttatactagctgatttcaaaatttactaccaaggtaaggtaatctagataaattgaacagagttgagggttcatgaattaatgcttacatccatgggcaactaattcctccaaaggtactaagaaatttcaatggggaaaggatactcttttcaagaaatggttctggttctactgtatactcacattcaaagaaatgaatatacaccattaccttacactatacacaaaacgcacaatgaaccacagacctaaagaccctagctaaaattttaaaactcctagaagaaaacaggaaaaaatctttattagcttgaatttggcaaataattcttagacacaacataaaaggcacaattcattaaggaaatatcaaaaagttggacttcatcaacttttaaaactttgagcttcaaaacacatctttaatgaaaaaataaatcttatacaggttgaaaatatttgcaagttatatatctgataaagaacttttatctagaatatatatataaagaatcctacaactcagtaatgacaagaatccagtaaaaaggagtaaaattttgaacagtcatgccactaaagaggacatgtagaaaacaaaaacttaaaaagatgtataccgtcattagtaattagggaaatgtaaatgaaaccacaatgagatacagctatataccctctagaatagctctaattaaaaagacagaaaataccaagtgttggatgaactatgaaaagaggcgattcctcatgcgtggctgctcagcatttagaatgcaacagctactttggaaaattgtttgtttgtttcttaaatagctaaacatatacccgccatataacagagtacttcagcacctaggcacccacctcggaggaatgaaaacacgtccacgcaaaggcatgtcagggaatgctcacgtggcttcattcataacaagcaagagctgatgacaccacaaacgtccatcaacagagagggggagaaacaacaggaactctatccaaaccttagaatagcattccgtaggccaaaggtgcaaactacggacacgcgccccaacacagatgagcctcaaaaacattgtgctgagcaggagttggaaggaagacgtgacgtatggcatgattctatttatacaaaatctccaaaagaggaaaatatttagagatggggcatccattagtggttgcccagggctgggggtgggattggattgttgcaaaaacatcattaaataaatgaaaaaataagcttccttctgcacacacatccatgaagcccacattctcaagaggacgtgaggcgcatcccaggtggtcatgcagctcaacactgtagatgtgtgaaaatgattgaattgtgcacgggcaaagtctattgaatggaagcatgtcagtaatgctgcaacaaatacatgaactgcaaactacagtagtttctactgtatagctagaatggcacttacttgattacacttgagtaagaatataaactgttgttttgggaaaatttttgttagaaaactagatttcacacagcccatagaatttttgtcactacccatagaattccattgtcagcgcctacacccgcctctggccgccttcccaggcatggtccaccgtgagccgtaactgctttgaactccttgtctgtcccgttgtaccgtcatcaccttctctgtcatcagtgcgattgcacacgcatggattccctgccttattgaagacattggagacctccctcccgcctacaggaccaggggccttcaccctcaggaatgcccagtacgagggctgagtttgcagtcaaatagttaatgttcatagagcttattagagacccacagcatttaatcctcaaacagccccttcagtaggcactattattatcatcatttgttcatggggccactgaggcacagcaagatgaaatgatttggccaaggtagctcagctggtgaaagagattcagggtaagaatcaaggctggtgcagtgactcacacgtatgatctagcgatttgggaggctgaggcggatcgatcacttaagcccaagagtttgagaccagcctgggcaacatggcaaaaccccatctctactaaaaacatgaaaaattagcctggcatggtggcacgcacctgtggtcccagctatttgggaggctgaggtgggggtatcacctgagcccaggaggctgagaccccagtgggctttgaaggcatcactccactcctgcctgggtgacagagtgaaatcctgtctcggaaaaaacaaaacaaaacaaaacaaaaacaaacaaaaaccaaagaaaaaaagaaagagaataagaatccagactgcctccattttaaaccactaaagacgatttggggttctcctcgtattatctgatgcaactccaggctccagcgagcatgccgtcctgcctggtctcctacccgtggctccgagcacagccccacagctgggagccgagcacgccctcccaccttgcctccccaccggctggggaccatggtgtgcacttccagatgctactgtcatttcctgcgacaacagaacacacacatctgtgaagtctataatcacaaactgagcgaaactcacgaggttatgacaatttcccacctctgaaaataacattgatggatatgtttttaagagactgacacatgtaactctttattaaaaaaattattaaataactccttgaaataaaaaggcagtcatgtaattaatagttatgtactacttgacagcataattactcattaccaatatgcaggaacaaaatgacttctaattttatcttcagagtctttaaaggtaaaaaagtacttgaaaggaagtaaactagaaagagaagatggcttttgtgagtgcttgagattcttcttgacttggaattaaaaaaaactaaaggttaaattacagatgatgttatgctgcatttactgaagcaggtgaatcatgaaaaccacttgtatatctcaataaaaataaattaaacatatatatatatgtagaaggcagtctaacacaggtttctcctactgttgtgttagctaaagatttttcttttaactgtctggggaaatgtgaatttatctgcatctgttcagaattggccaaacacctccacaagttgttcagaattattgacgagtcctgagagctaaaccccaagagacatttttccagcctgttttctgtggtgcagaaaggagcgtggtgtgcgggagcagaggctgctctcagctcatgtgctgagtccaggcctgtgcggagcctgaggctgaactcgccatctttacactcctttaagggaaaatacccctttttccagggaaaactgggagacagacagtcgacgtgggttgcaatcccaatgccggttgcagtgctgagggctggcccatcaggggcagcttacagggactgaggtttgcaccttggcgctggtggggtgtttagtgccctggatggaaacaatgctgggatcccagtgaacagacggcagggaatgttcctcggagggaaaaacaggcctctggaggtgcagggcttggttttggaatctaagctccacaggtggaggccacagaacagctttctcgggagtccccactggctttgtgaagagcagggaaggcatggtgagtgtccaagtgtcatcacattaatacagaattgacacatgtccactgaccatcagacagcagacatgccctggaatgacagcctccacagatccagcccgtgggacccagccccaggttgctaagtgtccccagcgaggcctgcccgacccctctcacccttctcctgctgagctgtggccttcccatgtcctcatcacccagcacagccatgcctcctgctcctgccctctgtgtgcacctgcctggctgccccacttctcacgcctctgcctgaccctgcgctctctcctgcatggacacaggcctccagtggacctcggatgctaaccccacgtctgcccacgctcgctccagcatggacacaggcctccactggacctcagctcctgcatggacacaggcctccactggacctcggacactaaccccacatctgcccacgctctctcttgcatagacacaggcctccactggacctcagacactaaccccacgtctgcccatgctctctcctgcatggacacaggcctccactggacctcggacgctaaccccacatctgcccacgctcgctcctgcatggacacaggcctccactggacctcagacgctaaccccacatctgcccatgctctctcctgcatggacacaggcctccactggacctcggacgctaaccccacgtctgcccatgctctctcctgcatggacacaggcctccactggacctcggatgctaaccccatgtctgcccacgctctctcctgcatggacacaggcctccactggatctcggacgctaaccccacgtctgcccacgcctcaggcacctcttgaactccggggcttcctctgctcagcagccgaggtcttttccgcaggtgctgcctggccctcctcccgtggctgtgaactcccctgcacgtgtcatgggagttcccaggccatccgtgaggcagactggctcctctcaaactcccacgacggcctgtcctcagtgatatttccgggctgcccccacactcgacatggaagaacgtgaatgacttgccagggccatgggcagagggaaggtggctacacacgtcccggcttgtcgctcaccacctgttaacagccacgcacaaagcaacccgcacggtctgaagtggcccgattgttacatgttgtattatatatagtttactatatatttaaaaaatgcaaaaaccacagttacttttgcaccaacctaatataaacatgtatcggtttctgctgtggttatgcatctcctgccttccctcatcagcacccaccctgtgccttcctcctaagaatccctctctgtggggtcctgctgccctctccttgcctgacccactcaggtcccaccttttccccgggccccggcgcacccgctagcaccgctttctgcccaccctggcctggacgcctctccctccccacaggctcacacatcagtcacccactcgaactggagccgggccctcgggtgaatcgttagctcctcgagcaccgagactgagacttatacattttaataacttgggacgtgcacaagaaggggcttgacgagcctcggattgatttattgatttagaggttgcttttctagccaaggcaactgaagattagactcctgatcacggacacttgactccattcggagagcagggcccatctgtgcatgcaagatcgcctcccacaaaggagagaaattctcctccattctttctcttgattgcctttctatcttaattttttttctctctctctcatcaccttcttacatctgttgcaggttaaagggcacagttcaatgtctatcaggtgaactttgactttaaacttaaatctcagtccttgcacagaccccataatcaaagtagaaaaccataagctgtgaaaacttcatgtagaagtttgcccacagctacacagccatggccatgacatctaacgttcctagatttctaatggaattaacttctactggtttgtcataagaaatggagatgcagaagcactggctgttttacagattacactagaaagagacataggggttttctctggcttttctctctctacagcagctgtctgtactgctctctcccagagtgatttctttccttttaattgatcacccattctctaatatacaaaatcaaataaaaccgagacacagcctcgtagagatcacctgtctctttggtcatgtttgtcctcaaggtgccagcacttgaagaggtggagctggagggcatcagccatggagaaggtgtgactccccccagcatcacccctcctccactcacactgcagacaggtctgccccgtctgaaatcagcttgaccctccatcctggaaaactgccggctgatgtgggctttcgcccatccctctgtgactggcctgagctctgcccttgtccacgcgtgggtagatcagaggcaggaaagacacatctaccctggagcaccctggcagcaggtgcctgaggggctgagagcaaacgggcggcgatgcattgcctgcagcctcctctggcctccctggcatgcttagggggaaaagtcgcttctgtgcacattgtcaaggagcgagggggcctcatcagtactttatgataacagcacacaaccctgctagccgtgggtagtgcctgtgattacttgctttctaccgatgttaggctgcgttacgatcggcattcactgttcagcgcttgctaggctgttaattattgttgtgtggctctaagtgatgctttcaaaacattttagaattttgttactgtgaaggcaccgggaggaacttaataagccaagattctacatgagaatgacacagatattaaaacaatgaaaatagtttaatcacggccttttcttccacagctatggctgataaaaatgtgtttctgacacttggccgaatgtcactagagactcagctgtctagggtccctgtttcattctgtacaagaaacctccatgggtgtggaagtaagtcagtttcaaggaaaagaatttgaatcctgagctattttagcatggatctctacgttttaaatgaaatccttcttttcagcgaactgggagaaatacaaagactttcctggtgtgtctttctcttctggaaactatggagaaaaatgaaaccagtcccgccatttgctcacggcggcctccggccaggccctggtcccacttccaggccagcgaatcacggctgcccagtgtcgtgaccactggaggggcctccctggtgtccgttgggttctgactcaagatcggtctgtgcttcttccctgtagctcctgcgagggctggacagctggccgggtttcatttgcctcatgaggggcttggagacattgatgagaagacagagagaggggagtgctgagaccctcagtgaggacaggcgtgaaactggctcaagctgttcgccagggtgtcccctagcaacacagagtccacgagtaacatgttccttggaagtttaggttattattttttaattttgagaggtttgtggttacttgatttactctttctcctttgtttagacaagaaaactaaggcccagggaattggactccctggtgagtgatgagccagggcacagtttctacctgccagtttgcagttggtaaaaatcagtttctgagacaagtgtgggtttactcctagccatgctgtcccctgggattggtggagacctcctcatcgtgatggtcaggacttcacagtgacattctaattcacttcccccattacctcctgctcccatggagctaaagcctcagcgctcaagcaccccgccagcgcccaaccccgccctgcgcccaacctccccactgcgcccaacaccacccagtgcccaagtccccccagtactcaaacccccccagcacccaacccccccagcactcaagcccctcaggtcgtcacaaaggccgggtgcttccgctctgggtctgtccccattgcctgggcacctgcagatcctgcaagtccagctcacccccggcccttcacaaactcccccaaactgccatccctgacaagacacgttgtctctcttcactaaacccctacagcttgtaacctgagacaaaatttgcctgtgacccttgtgtggcctctaggggttacacaacagccttgcacatgccattccgagaatggctgctaagtaaaacagcattaacacaaagtgacctggacacaaagacagggagcgagacacagagaatgcgggggaagggagcgtgaggagggaggaacctgacaaaaccaacccccgtcattccttcatctacttgcccaacaccatctgccgagcccttgctcaccccagcagtcacccagccacacccacttggcacttcatggccacctagacaggagcctctagccttgcttgctagagctgcagttgatttatgagataacccagcaatggcaccaggtcctttggctttgagtgtttcatcttagaaataggagataattatttctttatacatttagcaaacattcatgaagggtccactgtggccagagaccattctgggtccatgaatgggacagactagagcttggccctcccgacacttatgttctcgtgaggatgggagaagatgacactcgtgcaggtaacaggataatttcagatggtgatcaacgcagtacagaagcaaggcagggcataaaggggtggggagggcttcctacccagcggtgacacccttccctgggtaccagcctgttctcagggagggggcggaggaaagtggcttaccctgtgccctggttacagtaaactctctatcagaagccacgagtcatttacatttcagtctctaccctcgctcagctcttgggtctcccatggtgacagtgactctgggcagggcagagggggtgtgtgctggatccagaggctgaagtttcaggcagagaaatggcgactctatgaatgcctcagtgcatttttccacatggtggtttattaaaggtctatgtgcattttagatttctggattacagaaatatgaaggaacactttgggaggccgaggtgggcagatcatgaggtcaagagattgagaccagcctggtcaacatggtggaaccccgtctctactaaaagtaccaaaattagccaggtgtggtggtgggcgtctgtagtcccagatactcaggaggctgaggcaggggaatcacttgaacccaggagatggaggttgcagtgagccgagatcatgccattgcactccagcctgggtgacagagcgagactccttctcaaaaacaaacaaacaaacaaacaaacaaacaaacaaacaaataaatgaaagaaagaaaaaaagaaaagaattatgagggaaatacttatttctcagtagagccaccacccgcggtgaagtgtgggaagagtggcctgtgaaccagtgccccaacagtgagttcctagcttccctggaacaagaaaaaagggtgtgcaacacgttcgatgtgccaggtgcctccacgtggggtcccgacgccatccatgaacgtccacctccaccctttctaccctgtcttccttctttactttcttccttcctccattccattcaatgaggcctgtagagcacccaccactacctggcaccgagacaggctggacgcggcagggaacagctcacccagctttagccagcggggacctgacaaaggctgcctcgggttccactgtgaggtcccgttcctggtgactgggcaggctcgggctcagggccagctggtgtcatgccagggcgtatcaccttcccatgcccgatgtcagagcgcaaaaaatatgcttaacaggaaacccaaatgaacagcagtgcttccgtcactctttgatgcctgggaaggacttctacatccaggaagtgctaggtcaccctttgaacgtcagttacagttgcagtgaggtggctggcagatgaatgggtctggtgatttgatggtgtctgtctactggagatcttgggtaaaggacgacgctgtgtgggctgcagtgcaggaccaagcttccattctcctcctgctgccagatctaggaaaatgtggctcggttcacagttaggaaggaaaatatgtattttttaaatggtaatttgtaaaaacaatgtgagaattttatcagattattgtagttattctggaaatgtatagtgtcatagaaattctaaacaacaacttttctctctgttaaaattctcaccttcttcttctgaaactgctacccagaggtgtggataagcgtgatcttagagaggagcttgccatgcactgccttaggagaatgtgtccgctcttcacagggaaaaacaacatggcagtgggaggactgagacattttaataaaatgctgttgattttcaaaggtatacatcttagaaacatccttgtttttagctaatatttaagctgttcctagggccataaaataatctaaactggataaattcatcattatactaaatatctcatgaagaaaaacaacatagatcttaaacatccaacttcataaacacacttgtgcaggcatgtgcacattacacacacatgccacatgcatgcatacactacacacacatatgcacacactacacacatgcgcacacacacaggcacacaatactcacgtgcacacacatgcacacacagtacacgtatactcacacaggcttgcaaacacaagcatgcacaatatgcatctgcatacacattatacatgggcacacaagtgcttgcacacacatgcacactacacatgtgcacacacatgcacacacactggatactcacagcactagccttgtgaccatgcacctgcccatgtggctgggcctatggcgaggctgtgggctgagttgtggccctcaccccagagacagtgtccatgacggttctccaagtctggtgagactagaggggaaataactgccctaaagccctgagaagtcaaggactgatggcagatcctcacaccagtgtcctcctcccactcactgtgggactgcatgaagtggcattgaatagacagagacctcacagcccagcagtcacgaagaaccactcccatctgcacactcgttccaagttagcgtgacatgctgtaaaggctcatcttatgtggcaacttgactgggcttggggctgcccagggggctggtcaactgttatttctgggtgtatctgggaggatgtttctggaagagaccagcatttgaaatggtaaactgagtcaagaagctctgcccttgtccatgtgggtgggtgcatccagtccacagagggccaaatggaatggaagctgggggcagggtggatcgcctctgctggagtgggcctccctctccccagggcctcagactcccgtgctcctgcttcctctcctgcttttcctgcttctcctcctgcttctcctgcttcttctgcctctggactcaggctagggctacactgttggctcccctggttctgagccctttgggcttggactgaactatgtcactgatttcctggttcaccagtgcccaagcagggattgagggacgtcttagcctccatgatcacatgagccagttcccataataaacctccccatacacaggttgagtgtccctaatcaaaaaatccaaaatccgcaatgctccatagttcaaaactttttcagtgccaacaggaatttcaaaggaaatgctcaccagaatatttcagatcttggattttcagagtgtggacgctgaactgatgagtgtattgaaaatattccaaaatctgaaaaaacccaaatcccaagtgaacatctcaggtaagggatactcaatgagtgagtctgtctgtctgtctgtctatctatcatctatctatctatctatctatctatctatctatctatctatctatctatctatctatctatccctctatgtaatctatctatccatccatctatcatactggttctgtttctctggagaaccctggctagtgcacacactatcttatattgaataatgctgagtagtttccaaaatattttcacatgaaattttgtcagttgactctccgagctggtgttcaggggacaggctgtcctgggctctccctgagggtttgagcaggcccagggactcagtccaggcccccgactctgacccctcctctagtgtggagcagcctgaagcccgagggagtgtcctgtgccagcaccatgtgaacccgcatgtccaggcgacccgccatcctacatggcacctcacgagccccatggagctccttgccagcacagagggacacagagctcctcgtctccaccctctcttcacacctcccttgatctgcacatttctgctgccggctgtgctgtggctcctggggcccctctcccaccctcgcctgctcccacctgccctctgcgcctgtccccacgggtgtgtttcctcctccctcaacaccgggaggaccctggggccacacccgctccagagtcagattcaagtaagcaggtccttcagccgaaagtggactcaatggcccaagacctaacccatctgtgagaacactggacatgggcatttgtattttgcaatcaggccacagacacagcacacagaggtgatgtttcctaaagaaaaccacagcggttgttttcccaggactctccaggtgtccagcctaggcaagggcaaggtgacctcagaactggctgttctcaacgctgctccttggaaacgtggacccccagggaccatctgagctgagaggaggggcggccggctggccctgggctctggaagctccttcctccaggcactccttcctacctggaaggatgtgtttcttctggagtttgcaggttagggtcactccaggtgtacaagtgtttggaaatgaacctgccaagtattgtcatatacttggcaagattcctgcactgaattcatgtttattataatatgtcgcatgacctcaaaactttagaagcacacaatatccatataatctttccagttgatacactctgaagagttatatgtatgtgtaataaaaatattttaattgaattcaattcattaccagaacaaccaacactggttaactgaaagcaatataaaagtgcaaatattcattaatagtccatttttaacaagctctaataagcttttcataaaaccagtagttactttccagaacaaacattttttaatttttctgatctattctcattctagtcgattcttggtcacagctggatgtggttaagcaaaccaatctgtatttgtaaaagctggttttcatttcaaccctggaaagctggcataaacttaaatatttctctggatccaatacatattaactaaagtaagtgtatttgtgaaattgaaaagattataatgtacactgaaagagtctatggcatttttacaattccaaatgtatcttacgtagaggagtgcctttaaaaaatatcaaccatgggtgccacagtttaaaaacacacaattttaataggttaccttgagaatgatcaccttccttcattatttagatcatttctagagtgaaatgttcccatgttaatttattcaatagagtttttggagtcaagctctgtgcaaagtgctgggcctggagtggtgaactcggcaggctgagcagtcctggcaggtgcacgtcctatgtaacttagaatacgtctgcaagatcttcatctaagacggtatgagccttgagaccacagcgctgtgcttgctgaaagcattagtgtcaaattttcccttggagaagaccaaacccaacaggtccccttgagatgtggctctgcctagtgttgcgttgaaatctccggatgatgaaacctccctgctttgtgggtgattgccccgcccactctgagcttccctccgtcgggacagcctcacgttggattaggttcaaagctctcccactgtcttcatctcccttccctccctgtgaacggaactggctggccacatttctcttagagaattttaaatcattactcagttactcttcatttatctcagacacatgttgagcgattctggtcccttttatcttcactcatttcgttccttgcaataggctttggctatctctggacacctcctcactctatccctggacagttgctggtgtggctgtcaaagcccctccactgacccagaggcctcttatctagcaacagggctctctggaacactgtgcagaaaacctgatgttaaaacaaactaacaaagaaacgaagagacataaaccacggctggataggtaaacccagccgtgacgaagtccacatgggacatcagtgttgggctcccaggtgtggctctgaggcacgtttttggaggtcgggtgctcccttgttaaagctgactttataccgggaactggtttccagtacacagaagatgagaaatagctcaacggagcgagttgaggggggtgcaagacataaagcaaggctgggagaaaaaccaaaactggtctaggcagactgactttcttaaaaagtactaaagagccaggtgcagtggctcacgcctgtaatcccaatactttgggaggctgaagcaggcggatcacttgagcccaggagtttgagaccagcctgggctacaaagaaaagtcccatctctataaaaaatataaaaattaaccagacatggtagtgtgagcctgtagtcccagctactcaggaggctgaggcaggaggattgtttgagcctcagaggttgaggctgcagtgagctgtgattgcaccattgcactctagcctgggggacagtgagaaaccctgtaaaaaaccaaaagaaatggtgcctatgtaatgtggggggaggctccgcacagaccagcagttgcaagagataccacagttcatgccaccagtaatgccaacaagaatgttggtaagaacactttgttgatataaatcttgtacttattcaatttttatatatatgtagatagatatctatctatctacatatatcaatatatagatatttgatatataccgatatgatgtataatatacatcatatcaatatacaatatatgaaatatatcaatattatatgacatatataatattgttatatatgtcatatattatataacatatatcacaaattataaaacatataatattgatatgtaatatatataatattgatatatatatctatttctatgtagaatatatataatatctctctctatatataaaatttccaaccaacacttttgggtcacctttgtttaacttttggcacttacaataacagtctttcttttttttctgaaaagtgccctcatgatttaatactcattcatgattgaaaggctgttgcttaaatcttacagaattaaaggtgtccgcaacacaacagatgtagacacactgaaggaatacttctgcctgagccattttattttaaattactgagatttcttttaccacaagtggctctgctctagctaacatcagatacttggcagtttatatttctgccgtgatgatgtaaatcctgtttccacagaatcctttaaattccacaccttgccagctcggagtgggaaggaaggagcagcgttgcctgtcaccagcttcattctttaattatggcattcttccttgattagagctataatcacatagcaatccccaaatcttgattactggtggaaaatgcaagtctaatgaaacccattatactcttgaaaagcaaatacactttcttttagaagatggcaagggtttttgtcttaaatgattaccctcaatgcagaatttcagggtgttgaggttttcaaataattttccctaaaataacgtatttgttccttgatcctaagaagttacaatccatggcaacatgtagggaaagtattgtaaggtgaattcttgtcctctaacagtatgattcttctgattagatttctatcccatccctataaaatatcaataacttaaatgtgttgccactcttaaactgcagtttcatacgatgatgtattaatcgctcgcaataatttgcctcgtcaccaagttaatgtgtctgcgtggctcctgtttatgagcaaagcaaacctcctactgctccgggctgcctcctaacgccacttctgcgatttccctacagacactagtatcaggggtgctgaatggaaaagtagaaattaaaatggaaaagttctttgtctggcattgaaagaaaccgccaatatttttatgtgagaatgaacagttggagctgcttccaccagaagacagaaaagagaggtttgggggaaaatgggtcttgggtggctgggaggagatgctccaggctgttttccacatggaggaaacttggcaataatgaaagttccttttctagctctcattagttgcctctgtatttcctgaattaccctgtcacattcaatacccaatataaatgaagcaacttttaatcattccaggagagatggaggacagatgcagatattacacttcaatatatggaagtagtctcaaaatgtcattaactcgtgaattaacaatgagctttgattgttgaaaaaagatgacatatttccccatttagagtttgggacaagaagttaatttaaatgctaaaagtacatatatttgactaacttgatgtcacatatatctcttagcattaatacagaaatggcatttataaaagccataatgcatgtagctcaaggcaagctttcttaaacagtttgactcaattgagaccttataaagctttggtctattgttccactttcatgaggtttttttttttggtcaggccaattatagcgaaggatacatatttcaggtgaacctttattgagtgctgactgctagccagacatcgttctctgagcctcgtgtgcattacacagtttcttacaacaagccgatgaggcagataattttatcaccatcattttccaggtgagtagaatgagatttaggattaagtgttttttttgtaaggttgctcatctaataaatggtggttcccactgcagccagtcctctccatgtctgcgagatgacacagctggacccgacgagctgggagaaaaggcaaaatcaccactcatcactcatcttctatttgcttaaaatggtgtgtcgggggctcacatacttctcatccgtgctccctccatgcaggtgacacaagtcacacaggtctttttcttaaaggaggtggagaggctgccttgcctgcactcacacggacttccagtggggaagaagccgtcttggcgagtgtcttggtttgagatcatcagggccataccctcatcatggtacaagtgtttgtgcagtcagggtggaaacagcagggagcagacatgctgtggccatctcctaaagctggagcacttcaggagaatgggagggccatggtcccatgggcatgagtgctctcctgctgcctgccaagcctgtcctggaactgagccaggaggctgactgcatccaggaagctgaccgcatccaggaggctgaccgcatccaggaggttgaccgcatccaggaggctgactgcatggttcttcctagagcagggcttagagcctgctctgtggtcagtcatgtggccctggaagagaagtccccagagccttcaggaatgtcccagggtcttggaatcagagaagaccaagaaacgccaccagctttggaactgggtgagctttatctgggtgtttctccctggctggcccacagtaccagaccattcacgagcagcctgatgatcacagctgatccttaccctaagaaagctttgggctccaacatgacttcccgttcttataaaacacaaagagggccgggcgcagtggctcacgcctgtcatcccagcactttgggaggccaaggcgagaagatcatgaggtcaggagttcgagaccatcctgaccaacatggtgaaacctgtctctactaaaatacaaaaaattagctgggtgtggtggcgggcgcctgtagtcccagctactcaggaggctgaggcaggggaatcacttgaacccaggaggcggaggttgcagcgagcggagatcatgccactgcactccagcctggatgacagagtgagactcctctgtctcaaacaaaacaaaacaaagcaaaacaaaacaaacaaacaaacaaacaaacaaaaacatgaagagggctcaggccaagccgcaaagccatgacctgcccttctaacaggcacagtggttctttgtggaaccactcagaaaaaaacttcaggccttaatggggtgttggcgggaagatctgaagtgtgttttaatcccacagcccgtaaacactggatgccatcgatgagggagcatggcggctatacttacatacctctagtgatggggaactcactatctcctgagggtgtttttctgtttctcccaaggaaatttactccatccttagccagtttgttagagattgtaccgttgtaaaattcagtttagaagtctcgttttccttggacaattatagtcttactccttaagtggaaggggttgagttcaagctctccttctgaacgcctgcttctttaatagggacacactagggagggaggggtagatatcatggttcctgtccagtatgagaatcactagtgttgttgaaagaaagtgacaaataaacagaactaattctaccttttttaaagcaggttaaaagcaagtgtcagagcttgcagtttgctgccattagaggggctccaggggcccatttacattttgacataaaatatgaggaaaacacaattgagacagaaatcataaaaatggcggatgctctaaactaaacccacaagttaagctgaacatcttaagcattttccagataacaaactacgtaggtgaatcctgttgttgcctgggagacacacacacacacaaaaacacacacacagacacaaaaacatgcacacacataaatgtctatacactataaatatttttatggacaatcttctgaaacactattaaactatgaagtattttgtttgttttgtatatcatttgaaaaatatattagtgagaagatagacgtctcaaaaggagaccaatggtaaatggtgaattttagtaacagaaagtaaaggatataagaagaaagcttagggtgagatggtgaggtgaatgtaacgcatcccggctggacaaagctgccctgtggtctcacttggctacaattgcaagatccgaaattcactcttagctaacgtcagtgaacccatgaaaagcttagattctagcgaaaaagtattcattgttttgtcttcattcttagttatctttgctaaaaggaaaggttagctaaatctaaaaaacattttcataaactacaaatatatattaaaaatatctgtaatggatatgaacaccatgtgttaccaagggtggatctcattatattatttagcacccgatataaaataattcaataaaaagtctctgggcatttaaatctgaatctagcattgacaaagcatggattagctccaaaagggtctaaaagctgataagctccaatcaaagcaacagcacgaagtggtgtgtttccactttgacctgccacgtgctgacctatcataactgaagtcagctgctttattataatttcataaaaacaaatgatgtgaacaacccaatatcaggtctaaaaaccacataggctgttgtttaaaccacagcattttttgaaggaaataaaaggtctgtatttatttctagaacacagaagctactggggttttagccagaaactcatctgtagttaaaagagcagcagaaagctgattctttaaggtcttagggagcacctgtttcactgcgtctttgctgcgagagtgtggctgggagactctggcccctcctccatctgcacgtcttaccagcatctgctagcgttctgctttccaagttagtccgttaagattatttccttataaatcttttttaaaaaatgtgttcctggctgggcgtggcggctcacacctgtcatcccagcactttaggaggccaaggtgggtggatcacctgaggtcaggagtttgagaccagcctggccaacacgatgaaaccctgtctctactaaaaatacaaaaattagtcaggtgtggtggcgggcgcctgtaatcccagctacctgggaggctgaggcaggagaatcacttgaaaccaggagctggaggttgaagtgagccgagatggtgccactgcactccagcctgggctacagagcgagactccatttaaaaaaaaaagtgttcctgttataactaatttacattttacctcagtgcaaatatttgacatttattatgatttctttttattttttagaccaaaaagtctcattctgtgtatttgtgccattaatgacttcttttgaaaatttgacccaaaagctcagaaatcaaaaccagaacttgtgtgaggtcataaacttcaaaagcacacggattttggctaccttatatcaaaaatactcaaagcattgcttgccacattgtcggtgctcaatgattacttgttgaatgaacaatccacccaaatcctttaacttcaaatcttcctgaaacccgtgaacttggccctgcagaaagggatgcaggcacttcagttcccctatcttcctgggatgagttaagtattagtaaacatcgtcaacagcagaggcagccacatgcacgttttggaaaatttatgtcagtatttattacaattaagtatttcccagttgttatggctcaaataacatattatagccaatcagatcatttgatcagaaaaaaccaccacattggtataatttatataaaataaaagcaagataaagaaggagctactagagttgacctgctaccaataagtatcactcaccacagggctttcaaaatagcgaattagctcaaggccatctcaccatagacactcacacactcacacactcacactcacacatttacccacaaactcacatccacactcacatgcacacacactcacactccctcactcacacacccactcacactcagtattcagacacacatccacactcacactcacacacactcgccccttggctgtgaactgcaggcaggtatgttctgggtgaagcgggagaggcagacggcctgcacactgacccctctaagtctaggaaacctccaccccgcggccccctcctaattagcaatgacatcagcatgaacggattcccactgtgtgcaagcgcagggccaagaggcctgggtgtttattcaggtaatgcaactaataaacaggaggtaggcacacatctccactttacacctggggaaactgaggcacagacacccaaaggccatgggactggtgagcagcaaaactggaatttaaaactcatctctaatggactctactctgccttccctatttacggtgctacattaaataagacatgccatcaaacacagaaaaaacagatttctgcctaaagggtgttaatgatgttttacatgaaagggctggaatttcccttttgcagcgttttcagtacaaagtctctgcacctataaacttagccacctgcagatggaaggtgaatgactcatttttccccgcactcactttcataccagatgaggcaacttccagttacacttgacgtgttacattttcccagactggagggctagaggccactcttaggtcagggtcacctggagggtggctgatggtggggggctagggttacttcatgatttcatcccccaaaaaacaaaagcaacagtgacgtcagcttcaccagtatggggaagtgagtgaataaggtggaagagggagctgccatgacctgggagaggccaggaagaactcaagtcctgctgcgaagcgcgtcagaaccacggacagctcctggttccctatcccttagggtgcctgggcttcatgaccacaaaggtcccttccagcctccgcatgcagctccaaaatcaagtttttttcttttttttctgtacagaggcattggggctaatttgctgtctctgcagaaacccaatcccagatctctaattccaatcctgagaatgattggagcctgcggagtgacagtgacaaggtgcctggtggattaggctggtccctagaaaagtggatgctacattaggtcagtaatgtgaaagtagggcggtgtgatctcctctccccaggcttcctcatggagagcttcattaccgaatcgcacgcagcccacacggctgtctcccggccccactcggcccaaggtaaataaaactccaggttatctcaaaggcaggagtggaagcagctaatgcggggagatggggcattcattatgccatttacacgagctgaggataaatgatcaaattccctctgtcaaccacaaagagctcaaggataatttttaaatgcaggaagtattcctccagggcttttgtattttcttcctccaggctgcagccgcatttgcgagtgtgccaagctacgccactactgatttactgcgctgggaacagcactccatcaatgtccccgagctgccattgccaccaagctccccctgtccccgggcgtctttcttacagaagaaaattattcacttgcttgtatgttacatgcaaaacaaactatttttagctgcctacatctgtcacctccctttgctatccaagctcggtcgggggagcagggagaaggagaaggacaaaggagaggggaattctcaaatgttctttaaaaaagcaaaacgtgcacatgctggtggtgacacaggttatcatcggtggtgacagagaaatgtgcaggctgttcccattgctgtcacatgagctttgtcttgtcctgccaggcgcctacgcggagtggacagtcaatgatgctggcggagcacaagcaatttttcttgtctgtacaagaaaggctccatggagtctcctgctgctgatgcctctcacacttgtaaggagggtgggaagcctttcaaatgacttttctgaccgaatgagagattgcattggcactgaattcctcttcttgaggttctggattttcactttgttttgttaatgtttaaatttatgactcgagatttcactctcaaatagtgatggctaggggctcttccagtgtgactttgtcacactaattttcgcaagcagttttaagagtgcgtgtcacgcctatacaaacacacaaaaaagaggtcaaggtagactgtagaatgccagcgtttggctaaggagggtgtttatgtggtcagtgtatataaaaggaatgttattttgcaaaaatgccaacgcatggaaaactggtgtcagagaggagaatcagtgggtcctgggattctggcaggggatctggccccctttgcaggcgatgtgggatgacacagggaccaaggttctgagcacttaagacgcttcagtcagattagccaatagcacgattcgctccatgctcattgttgcattgcttacgcatgcatggctatggtacagcccactggatgggctctaaagccttaggtgtggcagaatccaaaaagactgattctatatgtccctactgggaggttagatggaccagggtagagatgcatgccagcccatcgacctggagcctgcacagctatggaactcccactgcccctgcagtgccattgcctagcagaagtaagggggatgcaaccactttgttacttccacataaagcctctaacttgacttcttgaagtttgcaagaagcagcatccacttaaagtccaactctgattgtgacagcttcctcacctggtctaaggatgcctcagtcacacaaaaccaaaactcacaccgtcagtgtatttaaacgtacatctaagcactcctcagaccggttggagactctgtcacatctaacccagctctgagtccatccctggcacttgactgcctcccacctccctgccatctacacctcatctccatcacgaaactctgcaatgttgagctgccccctctgcctctcctcctggagttcactttaacgcctatactccaatgcttgggatctcttcttttgctcaagacatccctttttcatccgtcattcttcttcatttatcaggtttattcattcataaactcaatcagtcattccagcacagggaaggtgcgctgtgaggtgctgtctgtccctgcctggtggagctcaccatcctgcagacatgaaacagataatgacaaatcacaaccagagtggtgttaggagacgtgtcccagggacacatgaggatggcacccagtctgatgcagagaggtccaggaaaggctcccagagggaagatccccatgtggactctacaaggtgcacacaggtgagttaggggcagcttaaaacccctgagggatttccattaggacacacccaggtctatccacatggcccaagtgctctgaaaacgatgtgtcctggggtccagcctagctcgtgacagttccctttactgctgccatcttagccatgctgggctttgtcaagcagcaaaatggcatgaaagctcaagcccccatgcacacccagaccatgtgcatcttgagggactattttctagcctgggctctctctctctgcatgttcttggcatcctttgaatccacaaacaatgaacagtggtctcattgaataggaagagagcaaatcagacattgaaagaaaaactaatggtgtgtgggtcttgatgactattgggaagggcagcggctttagccgctggtgggcgtggctgcacggtgaactcacactgctgccaatgcagtcacagaagacagtcaggttgaccccactggcagcaaaatgccagtctttccatcaagatgagagcagggctctggactcaaatccgaacttgcaacagtcccttctagtcctaaattctctgctcttcaccattttgctatagctcagacaactctctccctttttgttcatttgttttcacatgtgggagggggtgtgtgatgtgctatttgaggtgctgatgaactcagcaaagaccctggagatacactgagtgtgattgctgtgtgctcaccacaagacaccagcaactgagcatgcacccttggtgcagtcttgccagtgcctgcgtgcctgcgaccagcatgcaagagttcctctggatcctagaaataaggtggctgtcagtgagggaggccagtgtaaaaatggaaaggccccaccatttttgggaggataaaatccaaaggagaaaactgtgtgccgtgttgccaccaacactcgcacgagttccgtcctcactgccagtgttattcattacagtgcctgctgctctggaggcataatttaaaaagatgcattactgcagagaccctccccaagataagtcagtactctgaggctctttcacttcaaagtctttttccaggaacgttagaaagaagaaagtgctttagagttctttgtagaaacatagacaattgcaggattgcatgagtcactattttctgttagctgtgatttcttctaccattggctccttatgaaaaaaaagtgtgtgtgcatatatgtgtgcatgtatatatgtgtgtgtgcacacgtgtgtctatatatgtatgcgtatacatgtgcatacatgtgtgtgcatatatgtgtatacatatgtgtatacctgtgtatatacatttaaatatgtgtatatgtacgtgtgtatacttgtgtatatacatgtgtatatatatgcctgcatatatgcatgcatgtgtgtttatgtgagtatacatgtgtatatatatatctgcatgtatgtgtgtgtatagtgtgtgtatatatgtctgtgtggggatatgtatttatatgtgtgtggatatatatgtgtgggggtatatgagtatatatgtgtatgtgtgtatacatgtgtgtatgtgtgcatatatgtgtgtatatgcatgtatgtgcatgcatatgtgtatatatgtatgtgtgtatatgttgtgtatgtgtggtgtgtgtatatatgtgtatgcatgtgtatatgtgtgtgtgtatgcatgtgtgtatatgtgtatatatgcatgtgtgtatatgtgtatgtgtgtgtatgtgtggtgtgtctatatatgtatgtgtgtatgtattatatatacaatttttaaatttagggtatatctcgaactggaggctccagtttatgagcctgaaatgccattaaactggtgtgataaattctaattgagtggatacatgtcttctctgagagggataatttagggaaatccaagaagactgcagtttaaagccacatagacatgttagcagaaagtttaggaaactgaaaacacatttttatagttttaaaaagcttctgttttcttttttctgaagtgtaacatttctctggcttctgaacttctgcaggtgattacatgaagtttacactgtatctgtgctgcactttcccctttgcttcctaaaataattcatcttccatagtaacagtctcttcaaagcaggatttatctcgaaccctttcacacacaaccaggcacaaagtcacgttctttaccttgaagctgggacacaggaagagccgtgggcttgatttccagcctcctcctcaagcatccccaggacccttcataaacggaatgaactcgagctggctcaactgcttgttttaaaagtgtgttttttaggaaatacttgttctgccatctcccccatagttttacaaagtaaatcacgttgtgcttggaatcgtccctgcctacgctcgagaactgttcacttagaaaataaacatgtgggtaagcattggtccatacgtataagcgatcaagagaccctggcccccgtggaaacatgttttcaggcaatccagctctggtactctttgagctgcctttctattttacggcatgttcagaagatgaatctaccattacgctgactaacgaagtctagtcatagcgatagcggtgtcttagcagcagaagtgatggttggttaactgagcgtgttttagacgccatctgcattacaaagtatcttccatggggtaggccatggagtcagcaccactgttctcgaggggcagtctctagctcctcatcttacaagggcaactgacgctgacattcaacaactggtgcaatgtcagctgcaggcgagtaggtggagcaggacctactcagcaccaggcgggctgcccctccacagtttgcggtgataataaggcactttacagaggatgctaccatacttggtatagaaatcttgaaaaagtggatgctccggtgaagctcagagaggctgtgtggggtacccggggtgcacaggcacggacctcagacgcaaactcaacacattcatgcccatctttccatttatgtttggttggatcagcctaatttgcttgtatggaatgaaattcagaaaaaaaagaaggatgatttatttttacagcctttgaaatgtccttagtcatgtacttgtacttggtttgaaatcgtatcataaattggaatcagggaatttgaagggaattttcaaagtcccttgtgactctacatgtgcaatcttcagcatcgagtattccccaattttccacaggggatacacttttctatcatgatctgggcccctgtcctgcccttcagccacagttcatctttcctgaccattctgtcctatgataacgtctccctttaattttctccgtggctcatttgacagctaacctgtgtccacttttctgttttaacagctagcttctttacacaaggtatgggtgtctcaaatgtttaggcacatatgtgaaattctaattggttgattgctttgccagaaatgaccctataacctgggccagattaccagatgtgccagagtgtgctccagtcggtgggatatgcccctgggccagccagggtgtatctcagccagacagccacaagatgcagtgctggacaccccagtcctgagttgatggagctgctgactttctgggtttcagctgtatcatcagtaagagtgctgtatctattcaggcagaggagatggtctctccagctccactagagatcttagatctgtgatgcacaggtaattactcctaaaattacctgagacgatttctgaaatcatgagggagtggcttcctgaggagcgatgattacacaaacccgggaggacctggaggtcctgcttctgtcactggctgggctgcgtatcataccttttcataactacaaaccctccctgaaggtcttcccaaggtgaaatatccaagaacaagtagactgtatttgctcttgctgttgttccccatggtggacgcttgccataaatatggtggtggtgtctgcaagactggctacgttcatgactgctctcacatgcttttctgaagcatagattaagtggcagctctacaaagagtgagatttatagcctagtttatgttttttgggggtaagaaattcttcagtgtttctagaagctacttaaccttggttgatgtcacttaaaggagaggaaaattctgggtttgcaaggggagcctcctggtgttttgagtaggtcagcatccacattaccagatggtaaagacactttgctaggacctttgacaagctaagtactcgaggggctgtgatactgaagggggtggagaatggaggtggctcataaataatgtggtgctggtaggctgcagcccagacatgaccacagcgcagggaaacgcacctccgccagtcttggcgaacttcacagcaccttcccatacaaaagtggcagatactgatctaactgcatcagaagtccttgctatcggtccgtgaaaggtctaagttaatctgtcccttactatcttaaattaaacgggcacatgactccaccgaccgtccacgaggtctttcctggagtgaagctttaattctctgtccgcccactgcagtcccggataggggagtaagaaggtctgacagttaatgacacttgaggaagatgtgcgtgcctggagcttctcagcagtgggacatttgcccctagcagagggtcgagggacactggcaaatgctgacgtggatgtagcacggtcaccaaaaccccgcgtgtccgagatggtggagcagcttttcccggctcatgtgagggctggccagccacacagcaccaggctgactttagcagcttggtctcccaagccgaggctatctgaaggacaccagagagctgcgtttctccttctgtgccaaggtgaacacacaacgcttcagatgttccgctctcccctcgtgagacagacggcccggcttctgtgtggctttggggatgggagtgccagtcactggccacagaatgacaaattgcctccctgccaatatcagagcagggacagttctcgccacagcgtcctccagatgggcccaattaaactattagccaatgagcaaggtctgatggctccattaggaaccaccctgtgcttaaataaacagctcagaatacatagtttctccatcgagccctggctcggcgaaggccccatctgggcaaggtctccaaggttggccctggcgagccccagggggtgttggggtggctggggcaggccgccctccctggttctcagggtcctgcaagccacaccgcagtgggtgatgtgagagagggggcagcacccccacctgccatggccagggccaagttctccaccagctgcacccctttgcttgtgcacgcctagacaaccacactccctgactggatggaacttccagaaccagcccctgacctcagcacactagtcccttgccagctgtctttcccacatacagaaatttcaggcccgtgctgtttggctgttcatcatttgtaattactgccaagcaaggggcacatttcgtgcagaataaatgaagacagcagacagcgaagcggggccttactgcctgagcgtggtgggcgtgactctcggggggagcgggggctgcctgcttatgggtgctgctttctctctgcccgtgaaggtgaccatcacacaggcccagggcccctcagggctcttctcacccccacacgacccagggttggttcccagtgggagcagagcctgcccaggagagaccgctatctccactggtccagcttacacaaagatccatcgaaaagcatcagttcttgagaaaaacgacactataaataaaatggttttcaatacagagagctgggctccatcaaccctgctgagatccttggggacggggctgcgcctttctctttgtgattatggtcactgtattccagtaatttgggtgaactctgattggccatccaatatctttgatgttctaggaggtcacacactgcaaaaagcaaagcgggtctgtcccctgcttgcttctattgggaggggccacctcacgccctgcagcacagccctggccagtgacagctcagcatggctgcccagtctcagcttttaactggggcatctgttctgcaaatgctcctgagcacccactgtgcaccggccctgctagggacgtagcagtgaccaggactgccaaggcccctactgggtttaattcattccgtgtaatctcaggctgctgccagctcccgggaagaccaagccatctgtgctcctcccgggagcatcccacttcctttccagagctcggggctcaccttttggattctgtcctcctaccactgacatctgctcttaggggaggaagagaaacttcctcggggggcaaatgagaaatagctaatttgtgcggtgtgcaaaagaaagtcattgcttgctagaattgttgctatgatttttccttattcattaatttccttttgctactgggtagcatattgttgttcttggtttgtgttgaccttttcagtcctcatgaaaacaagccgtcctgaggcaggccttctttgcacaggtcagcatcagcaaggaaggctcattacccatttttaatgcagttagatggtgctgaacttgactgtgtgctttcactccaagatttgccctcttatcaccccccaagactaaggtcttggcctaggactgataaacaaaccagccgatccgtgacagtgatggaagggtgcgtgtgtgcagagttggggggcatgcacgctttctctgctctactcctcttctgccaaggccagtgtcctccctgagatgccaagcccctcagacgatggaggcctcctcccccctgggatcctgatgacaaccatctcaggcacccaatcacagagtgcttggaaatggccacttagagcttccctgcaaaagggtggctgatcccaatgtgaggctgttgttgtctccaagggccaccttcccacggaggtgacttgcacgagggtgtcagcgtccaggggaaatatggggctgctgccacagcctagagacagacaggagatggcgaggagggagactggtgcccaggcgctggcttgcctggggtcccagtcatggcagaaggacttggggagacagcatggaacaggaatccctgctcagagctgctgttgagacacagaaagaacctcccttgctggtgtctggcagagggtgttgatgacagtccaggggcatgaagaggctggggtttgaggctgctgtaggctctgtggggtcccaggaatgttggggggcccaggaatgtgcccactttcaatcttggtcagcgctctccacccgacgccttgtgtgcctgcagagccgcagtctccaccagacgcctcgtgtgcctgcagagccacagtctccaccccacgcctcatgtgcctgcagagccacagtctccacccaacgccttctgtgcctgcagagccgcagtgtccacccaacaccttctgtgcctgcagagccgcagggtctgggttttgtggcaccacatgttcggtctcatctcctcccaaatcctgttaaatttccctgaatttaggaccaggcccaatgccatggacacagtagaccctcaataaatgagtaatcaaattgatggtgaagaactgattttttttcctgttaaccctccctagcagggtttttattaatggggttttcagcagcttgcgattgaaaggccgccttgccccagggtacaatgaagtcaggacccccaggagggaggctccgtgtggctgggggaggggagtaacagaatgagcataaaatcgcagggagatgccccacagctgccccgggggtcctgggggctggctctgtggaggtagaggagcagaggtgccttcagcatccgatgctcctgcctgtgtctgggtctcctctccacgcctgctccttccccatcaccctgttctctgtggccattgcaggtgttgtaagccacatcaaatccacttgaaatggggtgaaatgaatctaccaatacctgaatcagtcagtagcaacctgaggtgatcatgtagttttctggttgcctgaggcttgcatttcaggctcagcttcaacaggttccagtggccatggggacaggaagtgcacgcctcccccgagggtcttagctcacccaaggctgcagtgtgagggccacatttcctgggggccaccccatggcactggctaccccaggggtgctgagacaggcctgttcctggagaccacctagaccctccaatatcacctgcttctgtctaagctctgaaatccccttccggcgtggtggtgcctcccctgtgcagccccacccagaacccctctttccacctgtgcagtgtgccccagcttccccgcagggtggcagttcagggctcactccccagcttcccacttactgcccacctacccctctagacagaggttctgccagggcggggctttcctgtttcctttggttctgtcagatcccagcatggaccgatcccgaagtgcagtccctcagagggtggagtgggcatttatgtgggctatttggtaatggcagcaatgtcgcctctccctgacgactctaccaggttggccctgcatgcttctgtgtgctgcaggtgagcttggctcatggctgctgatcactgcagccccttcccagccacacgccaggcccaaggtgatgcatgctgggccatgccaggcacctgtgatgaaatgctcagttgtgtgaaggtgctggccagcccacgagagctggaatgccagagtcacattcagttacaaggtggagccatcagcacagcaggcaggcgtgagggtgaggacgcggtcgggaggaatctcacttcccctgcagacccttgggagagatgcaggggacacagggcgaggactgggaggtgaggttccagcaggggcagggttagccctgcatggggcctttccttgaggtttctctgtagggtgtcccctgagccctgaggccacaccccttggctgctgaacctgcctgtgctatgacagttcattgtcctggacaataaggcactagaacagagggggtgttgataattaagccaagctccatgctgtggaaagcgggtgcccactcaacaccccagggtctaaggggacgtggcaggtttcactcccagactggccctaatgcagaagagaagggagaaaccaccaggttcccacattgccatccaggcatcttttccgggctgagttttctgcaaggcttgtcgggtccatcagaggtaaaaactgcaacgcacacctaattatacctaatttgctattgattaactatttattctaacagaaccactgtaaaactgtcctgtgtgtttaactatcaaaataaaggagtgctggcaccttctgcattttcaaacattctatgctctaggtcaaagttcagcatttttattgactctaaacaggagatggaaaaccacattagaaaaagtggaattaaaaaaaaaaagaaaactggaaatgcctttttattagaaaatggcctcatgggcatggctggctttcaggagtaagttcatggaggatcccttttgatgtgtcagtactggaacaagcgaggttttgagtattttcagtagcatctttgttcaaagttaatcttgtggatatcaaaccacctcttggaaggaggaagaatatctattttcatgtttacattacaaaagagcttataaattagtgggtttcactaaaagttgtattgaagtaagctgtgggttttgtgtgaggtgtgaggtgtgcccacacacctatatatctcgtttatctagcttcatccagacaaaacagtgttcacatttaatttttcagataactgaaataaagctgtctaagagtaaagtctttataaaattgtaagcacttttattaatgcacttctgggatatttttcttactccccctgcttttgaaaacagaaactacatcataacgtaatcttttaaaggtactacatcgccaaaatgggcatcaattaaaaccctggaaagtaactttgaaataatcccccttgtgttagtagaacaatgtatgctcatctggggcctcagatgacgtcgaacctagggactcatggcgtctcctccaccaggaatccctgccagcctcccagggtccacgtgtaattctacttttctcttctgccatgactcctagcccaaagacaaatacttctttgcaatctcatattgtgctaattttacaacatctgatatttttggggtggtattagatagcttcactttcatactggttgagaggttgggggaaagagagagagggaaagagagaaaaagggagagagagagagagagagctgctaataatatacaactctattcctctagtgcgtggtcttgtgaatgacgcacacttgttgcataaaaggcctttctcttcatattggggtgttggctatgacttgagatttgggactctcacgcgtcttcatgtgggatgtgccagctttgactctgtgactagaactgacttctttaggccaatgtgctcaaagataataatggtaattaatctttttttaatgtgcctattatatatgggaaggttatcttaaaattaaaattatcttcaaggcttatttatcctgttgcccagagaatgctgtggattttttttccatgccatgaagtagaggcattaggatgggccagaaaaaaacaaagcaaattccttcaaagataagatactttaagttgaaaaatcaaggaactctctcttcctaaagcagtggtacccatctagtgttttgtgtgtgtgtgtgtgtgtgtgtgtgtggtgtttaacaaaagttctcataaaacttagggtttctgattaactcagtgatgccaaattctattttttttttccacaacgtacaccatagaaagcatgcagccttgtgaaaagttcgaaaagaggtcttcagattcagagtctccaggtggccaatttcttctgatctagattttcaaaaaagtatgaaagcagcaaaaagttattaagcaaagctcaatggcacagctcaacttcagtacgttgcttcttgtagtactgcaaattctaattaatggcttgctcattgcacacaggaagtgagatttagcctagggaaaagaaagcaaggagtaactcaaggaatttgataaatcatatttttttatgtttaaaattccttctttttaaaagcggtgaaaatgtaacactttctcttcctcttactggaaattttcaaataattttgtctttcctcctctcttggcctcagacagattatggagataatgcactcaccatctctctcccctctgaagccacggtttcctgaaggtctcccatttctggagtctctcgaggcctccaacagaaggcagcatctcctgtgctgcaggcggttaccaagtaacagacctcagaagccttccaaggtccaaggatgtaaatgcagtatgtcctctaagccgagcgcagggtgctggaatccgagagccaggggccatggtgagagcttcctttgctgggaggcatggatgggatgaactccctggaggtggaagggcagcctccctcccggtctttctctcctgtctctccctctctatctctgtctctgattctctctctttctctctgctctcagtttctctctggttctgtttctccccgtctctgtctctctttatctgattctctgtctctctttatctgattctctgtctgtgtctgcctcagtctctctctatctcagtctctctctctctttctgtgtctctctgtctcttatctgatcctgtgtgtgtctgtgtatctcttctgtctctactgtctctctctgtgtctctgtgtctctctgtctgattctctctctctgtctctatctgattctgtctgatgctgtctctctctctctctgtatcttattctccctgtctctctctgtgtctctctatctctatctgattgtctttttctgtctctctctgtctctatctgattctctctctctctgtatgtctctctgtctgattctctctgtttttctctgtctctctctctatgtagctcttctgtctctctctatctgattctgtctctctctgtctctatctgattctctgattctctctgtttttctctgtctctctgtgtatctcttgtctttctctgtctctatctgatactgtctctgtctgattctctctgtttttctctctctgtgtatctcttttctctctctgtctctgtctgattctgtctgtctctttttctgtctctatctgattctgcctgattcgcgtctctctctgtctctgattctctctgtctctctatctctctctcactccattggcatcagcacaggacccagtggtgcaggggaagctcccagccatacaggacaagcctctgtcacgacagcccttgctggtgtctgcatcaggaggtctccttggcgatgaggtctaaggagcaactggcatcagaacagagcctccaacctgccttaggtcgtcaagactttgaagcaagagcctcagatgcaattagcaggacctgcctttgtgtcgtgtgctctgagctagtctcgcggaggctgctattgtttggggttcagctgtcagtattgttatcctgcaaaatctctgaatttccacttctctgtccaagtgccatgaagccagccaagtggggagaaagggttcttctgagattgattttttcccagacactgtggttctgttcaattgaattcactcaagttgtggttaacataagcactacggagagtatgacatgtcaaattagcagctttgcaaatctcctgttaattgtcagcctaattaaaaaattgctaattataatgtttataacttcaaataactgctcagctataaagtaggcctgtcaggtgtaacacaggggactggagggaaaaagtcaatcgacatctgttaatttatcagcggcagtataccaaattgaaaaatagattgcctattgcactgtaaatctgcattacaatgaaaagaccgaatcattccacacctgctaaataaacggggatgggagtccttcctggcctgccccgggctcctctgctgctcacatccccgtcctgtctatgagctgggggaaggccggagccaggcacagggacagaaaatgggggtccccacgcgacatctaaaaaacgaaaaaaccaaactgactaaaacgtgcacagaaacacgattcagacagtgggagcggggtgatccctcttccctggaaggagcctggagccccactgccggccccggtcactttagtctgaattctcagcgcgtctccagctgcagaacgatgaggctggaatacaacgcctttgtctctaagatccgggcaatcccagcccaactttcagagcctggtgaactcgcctatgcccacatctgcaggggtagctcctgctgggccctgccccatctgggcaacccatcatgctgcttccagtagttcctccgcctgccttccctcctctcctccagtgtcctgtgagactccggggcaggggctgtctccaccctcttcctccattgcctgccctgcctgggcgacccatcatgctgcttctgggttcatctgcctgccttccctcctctcctccagtgtcctgtgagactccggggcaggggctgtctccaccctcttcctccattgcctgccctgcctgggcgacccatcatgctgcttctgggttcatctgcctgccttccttcctctcctccactgtcctgtgagaccccggggcaggggctgtctccaccctcttcctccattgcctgccctgcctgggcaacccatcatgcagcttcctggttcatccgcctgccttccttgctctcctccagtatcctgtgtccaccctcctcctccatcgcccccttccagtctggggagtggagcatgcagaatagaagctccctgtgaccgagcctgtgctcacaaagcactggctacttcctggaggataatcatcaatccccttctgcaggtgcactaacagcacttgggtgttgtttagtttggttcaacaaacatttattgagcatttcactctgtgtcagaaattattaattattaatatattcagatgagggaagcaaagtcggtcgtaaggtcccacctttgggaagtttacagatgagtgtgactatgtatgttggattaaactggggtggaatggtggccagtcatgtcagccacaggtaactgcatgtaatgaggggtaaagaaggaacgaatagctccagtatctggggctccagagcccctgggattttgccctgtcaaccagaacacgtaaggcccaagaccccagaaaaagggtggatttgtcttataattgtgcccctctgatgtttcctgttgggaccccgtgtatcaggtgagcagtagcagagttggatccagtgtcggggtatccatggacacctgcccatccccagccctgcaccttggccccaaagtctctgaacttttgatccgcactgtgtcagtatacgtctggccttgccttcattccactgcatgtttaaccacattctgatagagcaggagcatcaccatcttggacaaacgccaccattttaagttctccttgattaaaaaccacctaaatccagccccaaaacatcagcctaatggctaatgtcagcatgaccagaaacattccaaccctgagataaaccccccctctgaccagaaacatgccaaccctgagataacctcgtctccaaacagaggcattccaaccctgcaataaactttccctcacacagaaacattccgagcctgcgataagctcccctccctaaacccttaaatacccttagtctgtaagagagtgctcctgaccgaaatcagccagaagcccctctcaggtttattttccaaaataaacctgtctttgactgtgaagccacttttcatgtttcctttcttctttctttaactcttacacattccccaggccctgtccccgtcgtcactttctctgggtcataattgggtacattcccagtggttttgtgtaccttagctagagggagggtgggtttccacggtttcctgagtcacagatggcctatgtctcacaggttatccctttcttccccacccaaacgtcctctcatctcatctcccaatagaggagaaagagaattagaaagcttcactgccttgggccaggtttctttccttcatggtctttattttacaggatgccttggaagttgtctgtctgaagaggcagctagggttgggggagggccccggcaagcacctagagtgcagacaagttaagcagagggtgggctttagccagggaagcagagccagggtggggagtacagaaccagcccagagcagagacagagggagggcaccatgtgagggtcggcattcaccgagcagacaggaaccagcagtcacactgcccaggatcctcttccaaacctgcctcagataatgtcacaatcactcccattgcacagacagatacttcaggcactgactttcacacacttgccctaaatttcccaagtgcaaagggacggggagaatcaggcactcaagtctctgggcagcttcaccgtcttccctctacggaaccgcactgctgctggggagggaaaggggctaggagctataaatcaggctgaagaaagggaaatgcaggcactgaggcagcggcagacgctctgacagatgaacctgcactgcagctgctcctctcagggcatgtgcattgagcccaggagtccccagggaggtccacaccctaagcccgggacccagacatgttacttttcagcgttgaaggtgctttaaggatgtggttaaggttactgaccctgcagtgggaggatgtcccagactattcttggaagggttattggcccaatccaataacccttcaaagcagagaactttctcccactaaaatcagagaggtttggaggtgaggggagcccggtccacgggtttgaggaggaattcatccaggcagcctccaggagcccaggctggccccagcggagaggagatgggcctccatcctcggcctcaggaactgaattcagccagcgccctgattgaaccggggcagggccctcggagccccctgcagagcttccccatggaccccttcccccacccagagcctgacctgcctgctcttggttccggccttgcaagggtttttcagaggactcagtgcagccacgtgggcccagacttctgactcacggaaccatgaggtaacaaatggcatggttttatgctgcttagtttgtggtaattttaccacagctattaaaaactagagcgagtttatttcctgttccagaactgtcaaatctgggtgaggctagggtctgcagtgaactacggcccctcgaaacccatggcttccagcaggccagagacagaggacagcagggaggagtccgcaggctccggttgcaacaattcacatcatttccgctcctgctgtgaccacgccgggtgcccagggtgctgggcaggaagttggggcgacgtctcccagcagtgcccctctaggggaagaagcactggctcctgacgggcagcggccacctctgctctggtttctacggaccagacatttgtacacatgtggcctgggagcatcagcagaacgccagggtgtgacccagagaactgccaatcaaccagacgcggaacacgacatcaccaggcagacacaggacaaagctaaatttaagtccagtggatgtgattagctgcaatgttcaattgaattatttggtaaactcagttaataaattttataaattcaatatattttatagtgtgcaattaaagtattttaaaagtgatcaactattttagagcagttttcggtttacagaaaagttgagcagaaagtacagagacttcccatacatgccgcctccttgtacacagtttgtcctactattaacatcttgcatccatgtgcgcattgattacgactgatgaagcagtattgatgcattattattggctctatttacatctgggttactctgcgtggtgcggctctgagaattgcgacaagtgcatctccccgccgtggctgctacagagcgctgctacagagcgctgccactcccgaaacgccctccgtgctccgcctgctcatccctccctccccgccacccctggaaaccatgaatctttttactgtccgcgtagtttcgctcttttcagaacatcatagagttgaaatcacatagtttgtaacctttgcagatgggcttctttcacttaataatgtgcatttaagctttctctatgtgtcttcatgacttgacaaatgaatttttttttttttctttgagacagagtctcgctctgtcacccaggctagagtgcagtgacgtgatctcggctcactgcaatctctgcctcctgggttcaagtgattcttctgccttagcctcccaagtatctgggactacaggcacatgctaccatgcctggctaatttttgtatttttagtagacagggtttcgccatcttgaccaggctggtctggaactcctggcttcaggtgatctgcttgcctcggactcccaaagtgctgggattgcaggtgtgagccaccacgcctggccaggtcatttctttttagcatgaaatatcattccctggtctgaacgtgctactgtttatccattcacccactgaaggacatctggctgctgccgagttttggcaatgatgaatagtgtggctgtaaacagctgtttctgtgcagtttctgtgtgcctgtgttttcacgcctgtgggtcagtgtgcgggtttgtgtgtgtccgcgtttccatgcctgttggtcagtatgtgggtttctgtgtgcccgtgtttctgtgcctgtgggtcagtatgtgggtttctgtgtgtccgtgtttccatgcctgttggtcagtgtgtgggtttctgtgtgcccgtgtttccatgcctgctggtcagtgtgtgggtttctgtgtgcctgtgtttccatgcctgtgggtcagtatcaaggtatgcacttgctgaatcgtatgaacagagtgtgttcagctttgcaggaaacttccagaccactctccacagtggctgcaccatcctgcactcccaccagcaatgaatgagggtttctgttgctccacatccttcaaagacctgacctaacgacccacaaatgctgctgtcacggcttctttctaagaggcttcacggtccagagaaatgcatttcacgaatggcctttagcagttggtaagaagaattgctgtttacggcgagcaggctgtgtgctgggcatctctcatgttcatcatctcatttcatcatctcggtcgtctggtaggagtgcactagcctccctcaatttctgacaagtagctgaagactggggagatgaagtaacttctcaaagatcacagtcagcagacggcaaggggaacgtgggactcccatgcggctgactctgggggccctgccatccccagcctagggcgctgtgtgctgcatcctcatcgctctgttgccaaatggctcctcaagactgccagagttcttctgtgccccactgagttgcgtgggcttaattgcttagaatgagatggcagaagaaatgttgagaagggaaatcaagaaaacagatggcattcaggaggccacagaaccgaaagaaagaacaccagggacccatgagattcaaggtgagtcatgccgacaccttgaccaggggcaagggggaaggagcccccgtattttgtcattaaaatctctagagttgccagaacttcttgtattaagtttcacttttcccacaggaagtactggaatcataattaaaggaaaaaaaagcttaggtcactgctaacttccaacttcaacatctttaattttagttatttcccctggctccctggcttattgccctagatctttccttaatatttaagacttcatataacaattaatataaaagcttcaccgccgtttccagctcattggaaatgcacgtgagtgggcgttgtgcgcagacactgagcgtggctgggggagacgccacagaaacagaggacgcaccccgacgtggggaactcgcatccacccagggaacggcacacatctgcctccactgccaatgcaggagcactgggcccacccgagaggacctccacgaatgccttctgcatgcggggcacccgaggcccagagagggaatccccaggcaccccacccaggcggtgcatagacagtgctaggccctgcatgccggggtccagcccagggctgtggcctgtgccaaatgccaagaagcaatcgtctactgggaggggaaatgtcagccattctgaggcagctcagggaaatccaactcctcggtcctgaggacatcaagagaaaaaggagtgatggcacaggccggggtccgggggaagggaggggcatttctctgggaagcccctggagatgacacttccctgggggccttgtgtcccccagagaaggcctcaggccagtggcatggatgcttcgaaggcttcttgggtttgcagcatctcagggctcaccagaggcctccaggcccacagtaaatgagggtgcggcacgggggcgtcagaggacggacaaggatagcacagcaacgaagcactccaagggcttagcccgacattcagggacccacagagtggcctgcagggagctggggcccagccacagtcctgccaggtggaaggaccgggcatggaggctccaggctgagaccagcattggatagggtgggtgggcagggattacttaggtgccaataacccaggagtagaggagatggcaccgctataaaatgccacgagaggtgcgcacaagggttcagggctgcatagaaccgggagggagaggaagaccccgctggagcaagtgccagggtgacagagccagaggactttctgagatagcacagccccgagggtcggcagggcactgagggccacctgccctgcctgccccgccagggcgagcatctgaatccacattctcctgggccgcagctcatctgcgagtcggagcctccgaaggggggccagtagcacatgtcccagcctctctcgcccaggtgatcctcatgaccagacgcggctttgctacaagacagctcagactgtgttcccccaatcgtgttcccgcaggaaagctgcccgaggatttttgtcatgcacacgccgctgccagcccattagctctccctgcttcccatggtctgccgcatctggggtatccagcgtcctcctgcagccgagggggaattctgaatgttttgctagaaaccgtctcatcaacattcagtttcctaacattggttccaatcctgatttttagcttcattttttttgaggggcgagggcatctgggcactggaaatgcgggaacccacacgcagctcatccacccataggctctgacatgtttaacttatatctgaaagactctgagactcgagatggccaatgtttaacggcatcagctttgaccagcacagttgcaattatttgacatgatgtgttcaacccatcaaagttgaccaagggttttgtagacccatttgctcagggtaacataagatcttttgacaaacatgtctgtttacgtactttcagaatttgtgtagactctgaaaagacccctgatgtaatctactaaaaacatagagggtttttaagttattgttatgtaattaacatctgtaacggcagttgacttaaggaaatgtctttgcacttacagtaagtacatttgtgtgaggaattatttgcgtaaattgtcccaaatagaatttaatttaaaagcatagattttatgatcttgctcatgaaaagctgagaatgatgaatcaaacattaagttaaatgtcacatgataattagtcagatattgcgagcttacaactaggatctttctgattctctgtctcttctttaggcatcaggactgaatcatatgttttatgaggcctataaaacatgcaaacctctgatttagctatttttaaggactgtagagacactcaaatttggtgtatttaagttgaactcacatataggatatgtaaaattgcatacaaaattgcaaatggggttctctgtaaatatgtttgctaatgagaatattttaatttcatagatcataccaggaagataaatcatccatttacaaacagcagttgcttaaaagatgtggactaggcaatttttccatctccagtggaactgagaggtccttgttttcacagctgaatattcaaaggggtgtttaccataattggaggatgcttgacagtttatgcagcccacacttagcaggcttcaaaatacatcctgaattatttgttgcaaacccctagataaacaagcaagaaatgctgctcaattgtcctaaaaagccacaaattagaggtattttgggttactcatagtgatttctgaatgcagtggtaaaattctgatttccatttgtattaattctctttgtgaactttaaaagaactatctttcaagtttaataacctttctgaaaaaaatcataactgtagatattaacctgaaacacaagaaaatggatcaggtggggcatcacctgtgaagccttgttgggaatatgttgggtgagaacattaggtcacttctctctgacaaggacaccctccttggctaaaggctggttgggtcctgtgagccctccctggatgaggcgttagcaggaatcccgctgagatagtgggctggacgctcaccctcacccttagtgatattaaccgagggcctctgtgattttctctccaggccctcgccccaccactcggctgtcatccccactggccgctggtgcatttggacttgggttcagtctctctctccggttgcaatagttttgagtgaagtcttccttctttgcttaactggtgtcatacaatttttcttttgcatgtgttacaactcattagaacccagtcatgtgacatactgctccctctaggaatgaggcacaaaggacattggaacagtcaaaatacacttctcaaactttaggcactgacatgtgtgctgttagtgcagtggaaaacccctcagatatgaattcagagacagtttgccaatattttagttaagcatctacaaagcttggattcgtgtgtggttttccaagtcccagggcatgcaaatgagccaattagaagcagtggtggggctgatcggctcactggaggtcaggaaaagtggtgtgaatcacccacgttcaggtcaagaactcaaacagcaaatagcaattagggctgaacactgaagggaccaacactgtcaccatctcaagaggccccgtgtgcactgttctgcggcactttatgagaaccaattttcataatgataagccctggtccccaaggaaagattgatttatgtttcacatatttattaatggaaggagaagggcattctaatctgttcgagagctttctttctaaataaaacagtcctcccgttgtgctgctcacaggctgcttctgttacatccaggaggaccatcttctgtgagctcctggtggcaaaggtgttattatgtgtgacagagcctggttaggtggcaccagccctgtaggaaggaccagtgcagtagctagtttattttcaccttgggctggttggccgtgaccgtctccccttggcccctggggctggcctgaggacaacactggggaattacaaatggagaggacattttatgcagcaagccaagccctagcctactgcctgcctaatgtcacagtgagatgagaagcccaggtctgcagggtgaggtggtacctcccaggtgccctacaggtgagagtcctcatcagggcttcaccaggatccctcagctccacgaagagctgtgcagggctagtgaggcctgaggagatgataccacgcgtgtctcccaggggggttgacaccaacccctagaagggaacagaggtctcagagtcagccgatcccgaggacttgaaagtcaggctccctggaagctaccaccacccacctgccttgtgtgaaagcagcacacacataacacatagagacacacacagacacacacacagacacatgcagacacacaaacagggagacacaaacacagacacagacacacacacactcacagggagacacagctagacacacagacacactcacagagaaaaacacaggcacactcagagagacacacacagacacaaacacacagactcactcacaaacacagacacactcatacagagacacacagacacaaacacacacagacacatgcagatacacacacagggagacacaaacacacacagacacatgcagacacacacacccacagggagacacacctagacacacacagacacacagagacaaacacagacacactcatagagaaaaacacacagacacaaacacacagacacagtcacagagacaaacacagacacatagactcacagacacacaaacagacacactcatagagacacacagacacaaatacacacagacacactcaccaagacaaacacagacacacccatagagagatgcacacagacacaaacacacacagacacatgcagacacacagacacatgcagacttgcacatgggaagaaaccattcacgtgtgggtacagggcgtctgtgagtctcacacttgaccgtgtctccagtctggagcctcaggccttcatgaagcctcccaggttcctagggggaagacatagcctctgtggaaccctacactaaacattttgaatatttggaaagatatctttataatccagccaatatcaaaccttcactttccttctgttagcagccaatatgtttgcgtataattttcatactagtttgtgtcatagtaagttaaagagatagtatttggaaggttttgcatcaagatttccttcctagcacatggaatttcagaaataatatttattacatttcccaaagtttgaacaggggtccttagaggactgaacccagcagcagatggattttacttagggcacattatttcaaaacattcagatgattcatcagcttataaactgagatttgttccagtaagattttggctattggcttcccttgaaacaccaggagctcctgcttccttgaaactgagttaccactgggagcagttgtcagatgctgaccggcagccacccctctcccagtggccccggccctgccacacataccagcagccctgccacacttgactcattcctggaaggaacctggtgcctggacacctgagtgtgcagcgccactgaagctcaacgcttactgtcgctcagggcctcgaggctcagaaagtgtgtgacttaaacacgtcacggaggccgggcacacagtggggccaacactacggcttcctgagctgtccagcaggtttctgcttctcaacgcggccctgcctggttctgtaagagcaggagcaggagcaggtgattaggacgtctgcgcaggagccgtggcaaaaacgcttccagacaatggggaactcagacgtctggaagggacgggggcagaacgtcagcgccacagacaaatgtgaatcaggcttattacacatctattgagtgagtcagctgcacacctcaagccttttcctgattctgatttttaaatggaatttcaaattctttctttgaaaagaaaaggaaaggtcaaatacaggtaatttcatctccgtgccgcgcatgcacatttcaaatacaatcttccagcttgctgcctgttctcacacctcccggttacttctcctcttcccagggacccagacggggagagggtgctgggcgccggcaagccacagcgtctgctctcatgatctcgcccccacccgccttgggcccccagaggtctgtgctccgctcctcttcctcctcagaactttctattcattacatcccagcagagcacctcaccacggttgccccaggaaaggatgcatgtgtggttttgctgtgctttttgtttacaaaactgatcatgttggttaactccagcccagatgttgcagaggttaagtctgctatcaacctggagatgttcggaaggagacagccatcaccacccgtcacacctgctttgctgcttctggtaacatgcatttgcctgcaggctcagggcacgtggaaggaggtgtgagatagaatcgggacagggccaacttgcccatggaggtggcatctccctcgtgcttctctggattctgtcacctgttccagtcctgggaatgggctgacaattcatctcctcgttctgtgcctataacattgcattcccagagcatcggtgccacctttccagctgcgacagtgtaccctgtgtaccacatccagtaacctgcaataagagacgctccatacgctgcgtcaaattgaggaacatgcagcgaatctgccacagacactgacaccacgtcgcaccgagatgcccaggaaatcaggagttaaggagacgtcgctgcttcccttttcccttctcacttgcactgggggggagtggggtgtctgtacctaaaagccctttctcactggctgtctttcggcaacatacttgctcttgattcacatgcccctgttcatgcacacttcggggggcggaggggcagagccctaccccatccccgagagtcagtgtgtgaggtgggcatcaagcagagccctaccccatccccgagagtcagtgtgtgaggtgggcatcaagcagagccctaccccatccccgagagtcagtatgtggggtgggtgtggacagcgggtgtggacagcctgccatcgttttcctctctctctgtctccacgggcactgccaacgccccgtctttcaacctcctttgcagcttggggctcctgtggactgcgggctgcccagggatgtgctgtgggttcctgggaagggcgctggggtgtcgagcaccttggccatcctaaacttaaacaccacgcgggctcgtaattaatccttcttgaaggaacgctgctgattccctcgacattaccaacaatctgcggttgaactacagacatacacccaagcgggcatactgagaaggaaaacaaaatccctccgccaggaaggtccacctctgacggatgccgcctccaggccgcacttctccaagagcccgccttttcctctctgcaggcctcgcgcagctcctgcctccccccatgcacgcgcttcgccttcctccctccaagccccgcgcctgcctccctccatggacacactttcccctcctccttgcaggccccgcaaggctcctgcctccctccacgcacgcacttccctttcctccttccaggccccccgcctgcctcctccacgcaccgcaaggctcctgcctccctccctccacgcacacacttccccttcctccctccctctaacacatatccagcaacctccacgtctggttttcctgatggagtaagttactgaggacaaatcattttacaaatgagacaactaagagctagaaatggagagtaattactcagggtactgcacaaatccataggagggaaacacacttttaacctacgggtttcatccagggcttctcaaatgccactgcacttagtttccagagacaccaacagcccggaggggaccagggggatgaactgaggcgtctgtttctgcctcagacacacagttgtcggctggaccaaatgggcttcacctcattccttttggtgtagcctctcccagggccagtaatactgacctgagagttgatggataacttgaaaagtctgttattctggcattgggaagacttccaactcacattgtaaaaacatgaattttattataataaaaagtaaatatcgttcagtgaatatacatgtatatgtataatagatcatatatatttcagatgcgtaacaagtgatttgtagatttcattttatgtgtgtgtgtgtgtgtgtgtgtgtgtgtatgtgtgtgtatttagaggcactttgtaagtgggcaacttatggtcaaagtctgggacttaaaatatcctaaatgaacgttcataattttttttaagggaaatattgatgaagccctgtcgttgaaacaaaaagtttgtaaggataaatcttgcaaaatgatttctttactttctagtagtagtcacagaaacaaagaaacacgtcgcttagaccttattgaagtagctgcgtgggagacacttgattattccaggaaagacacatggcaggatgagagtgtgaaaaatgaacactgagcactacgggaacgtcggatcataacgatgacgaaggaaagggcgaatccctccaatggagtctgctgcatggacagggctcaggacggggaacaggagccttcagggctgaggccgtgcagccactgccaccgctcactgccaggcaggccttgctgggcataccaggaggggcagctgggctgtgtgcccactcagccacttccgggatgggatcctaggccggttaccgacttctccctgccttcatcctttcataaaatagaagcagcaatcatatctgcttcatattaaagaaaggttattgggcagatgttagaacagccaacataaatgtgttaaatgtgcaaaactgagaataacaaccaaataatgtgttaataatcagagagaggttctacaggagaaggtttagctgctgcaatcccctgaagtcgatgtcagacctgagggctgcaaggaggccactgggaacggccccgtcggccgggggcccaggaatcagccctgtgcagagtgcattccgtaatgtgtgcaccttctctacttcagaaaaaaatattctttgaaagatccattttttaaagcctccaacccccttgtgagaaaattggcaactgtgggggcccccgcagcctcaaatttaccagtcctacgggtgtgacttgagagggagtttcctgctggatttcaatgaatggctgcgtatgttggcactggctgcacttggcttcctggacttccttggtcggcattttggaagctttgggtggcactgagattttcaataggagctatttgttataatatgggcttgaccaatattgatctggcttgtagtaaaaagtcagaataaaaagcgtatacagcctagcatgaagtagtcacgatcgtgatttgataaactgtgcagatatcgttggccaaaaacctcaagttactcctgtcaagccctttggttgtgttgcggttgggaggtcacagggtccggttttgatttctagcctttagatcaccgtgtgatgcatctcctctacctgaccggtcccggaggtcaccttccactcactcatcaactgtaagtgagtaaaagtggcgaaaatcatcatggggaagtccaaaacctaaaataaaaaaactggggaaagtttaagtcattcaagtcggaaagcccctgaagaccttttctgctgtctgcaagatttcagaagcaatgggccttgttcaggaggtttgggttcaaggatgcatggatgttctggaggtttgggttcagggatgcatggatgttctggaggtttgggtttgggggtacacggatattctggaggtttgggtttggggggtacatggatattctggaggtttgggtttgggggtacatggatgttctggaggtttgggtttgggggtacatggatgttctggaggtttgggttaagggatgtgtggatgttctggaggtttgggttgcggggtacatggatgttctggaggtttaggttcagggatgcatggaagttctggaggtttgggttcagggatgcatggaagttctggaggtttgggttcagggatgcatggatgttctggaggtttgggttcagggatgcatggatgttctggaggtttgggttcagggatgcatggatgttctggaggtttgggttcggggatgcatgaatgttctggaggtttgggtttgggggtgcatggatgttctggaggtttgggttcagggatgcatggatgttctggaggtttgggttaagggatccgtggatgttctggaggtttgggttggaggtgcatggatgttctggaggtttgggtttgggggtacatggatgttctggaggtttgggtttggggatgcgtggatgttcaggaggtttgggtttgggggtacatggatgttctggaggtttgggttcagggatgcacggaagttctggaggcttgggttggggggtacatggatgttctggaggtttgggttcagggatgcgtgaatgttctggaggtttgggtttgggggttcatggatgttctggaggtttgggttcagggatgcatggatgttctggctgacagcctggagacctagggctagttactcagtctctgagctggtgatgtctcatctgtaacaggtgagataacaagggaggcctttgcagggagtgaagggaagccgtgtctctgatccctgcaggagggcagaggccagcctcagctctgagtggcagctcagaggaaggggctgcagaggtccgcgtgggtcagagttgaatctgctcagacttggagcccagttagatgaagatgtggagtaagggctgcatcccacccacccccgactttggtaagaggctgtgagtcagggcgcgtttctaactcttgacctgagcccctgtgcacaggtgcttctgagtccaggatccatccctgaaggtttgcaggcatattaggacaaaattgccattttgggtcttggcaaatgtgcaatatgaaattaagtgagttaatcggtagttgggaaattattagagaggctcaaagtcccacttctgctgcagaagaaaataagagtccctgttttctcagatctgtccaaaactttctgtgagtgcagctcacagacccaagggcctctagacgcccccacccagaactgctgagtgaatggtcaaggcttccttagatagtcctggcttgtgaaccattgacttgtatagacttagatattttatacattatttaaagttcatgaaggcaccatgtttgaagcatatttagacattgcttttaaagaaaaatagctttaatggtgcacctgagagtgacataagcataaccatattatcttttaaatggaattttcccccttcatttttatttttgagataggatcttgcaatattctccagactggggacctctgggctcaagcaatcctcctacctcggcctctggagtagctgggactacaggcaccaccatgcctggcttccctgtcatttttatctcaattgtttagaagtttaatgggaatgaaagaagagggtcttagaaatatttaggtgattgtttaaaaacttccaaagaccctacttccacggacactcgtattattcattttaattttttttaagatggaaagagtgtttcaaggaagtgaagtgatggtcacaggggaagcatgaagaggatggagagaaggtgggtgaggcccagtgagtgtcagaaactcagacctcatgggtcactgtggagtggagggcccacacatttcttcagcaccaatcctgttttcagggagaccctctatctggggaggagcccccctgacctgcctgttctggaaaacaaggacccttcacacttatcaggcagcttacacatccgcttcaccccagcactaaggagcaaggctcagggcctgaggccatttcatcaacatgcttagtttaatttaaagaataataaaggagcaggcttggagtggaaaacctgcacatgaaggttcagaccaagataactgtttccttccgaaggctcaatttctgtttgtagctgtgtttgtttagtgcctttggaggaattcctcactagagtccttaaactgaagctgccgactcggaccactctatgcttcagcagcaggacttgttttaggcttgcaagatggaaacaggtgcaaaaggtttgtttaaagggagcctcccctaaatgatagaacatgctggtactgggtggggctgggctggtgctgcctggttgggcggaggtgaacatctgcccaggaaggggtgtgcagggctgtcagccacactgaagggggtcccagatgagaggagccctggggaggggcaacaatgggacctcctaggaagaaggcaggagtgtcctagccgggacccaaagccacattcctgccaggtggagctcctcctggcctgctggtgcatcatggatttggagctcaagaaggcggctgtctacctgttgttggattcactttttaccttttagatccacactacagctatgtatttgcataactcagctttggctgtcacagaggggagcagctgtgcccatggctcctgcacctgccctggtcgcaacacacacaggctgaactcggcaaggctgctctgtctctgcagatccaggctctgtcccacctcctgctgagggacagccggcaggccaggcttccctcactctccctaggaagccaggtcagttgctcttttagcatgtattttgtattcagtaaataaggctttatgtcttttcacagatagcagagaacgaccacatggttacaagcatgctttttcctccaattcttccctgtaaacttggattctgacatccaggagacaccaagggaacaaactggataattggaactacaccacaggcctagtggttttaaaggccaatttctgtggcttcaaattccaaaggaatgggtgagtgcagatggcaggggcttggctgaggggtcggtcacccagcaaatgcccagggcaatgccacaggacctcagggtgagtggcctcagggtgagcgacctcagggtgagtgtcctcggggtgagcatcctcagggtgagggacctcggggtgagcgtcctcggggtgagcatcctcagggtgagcgtcttcagggtgaacatcctcggggtgagggacctcggagtgagtgacctcggggtgagcatcctcgggctgagtgtccttggggtgagcgtctgcgcaccttccctttcagcactcaggacagtaacgaacacagggtcacactcaaggtcaccgagaactttggggcatgcaggggggctgcctgggcttgcatctccttctcacctgctggctctctccttttcaagtcgctttttatcctctacaatatcttgaaagctcagagcttgaaaagacttgggggtgctttaccctccctggagtcccttttacgggtctggtatggttagcaagctgccgtagttcacagccaggggcccagttctttttaggagagcacctttgcttgcaggtaactccactgtggagtttgcccgaggtgcagctgggcagtaagtgtggccccttcccttccacatctcggctgttccaacaccgagaagctgctttcgtttctccaccaagccccctctcccgggcacttgtccctcctggaccctgctgcctggggttgtcttgcccaccaggtaagacatgtcctagcacagaggaggagagagtacaggtgcccacgtggctagaggtggtgctggctccctcacgggcattcaggccaatgcccactggatgcagacatgagcgagtgagttctcctgtcctttcccatcagcttccatcagtcacgatttggggcaattctcacaataagaagtgcaggccctgggccccatttccagagaggcagctttaaacagcaaatatggggcagttggtgtttcatctttccgaagataacccagctgtggagagagaaaaggcatcgaggagctgccctctccttcatccttggaggggcgaccacacattccagcagctggggactatcctggcctcattattaatagtgccctctctcacttttccgagtgtcctggtttgggtgataaataatgtgggcaccctatttagaggagatcctgtgccgggcaccacaatagccaaggagtctctatttccctccctgaattgtctcatcagacacatatctttccaagcagagctaattagaattttgcataaatggaattagtaatgagagatttacccttgtgctattattttggcttgaaatctgtcctggaccgaatggctgatttcagtcaaggtgatcgggtgccacttggtgcaactcctgggcccttaaaatctcatttcatgtgacctggctaattgaggtgtttttatgttaatgcctcattatggccatggtgggaagagctccagttacaggatgaagagcactgtcccccaggagcactccggtttccagagtgtacagctgcagactgttctgacacacacgcggcgtctaagccactgtgccacgatctgtcgttgaatgaggagatgttccaacgactggatcgcttgggctcaacacggaaactgagtgcaggggatgcctgctgcctggacgactggaaaagcccgttcctccttagtctgtgggttgtcactcttaacattgctgacattcctttggcacgctgcactttctcccccttagaaatgttcaaaggcaggaagctcccttcccacagactccagtcaacagcaggcccagagcagccttagccacttaacctgccaggcagtgctccagtgccgtggccagcgaccccactcccccaggcctccccagcctgtttgcttggcacccattcccctacatattctttcctgtgtaacccgccactcatacaaactgccctacatattctttcctgtgtaacccgccactcatacaaactgccctacatattctttcctgtgtaatccgccactcatacaaactgccctacctattctttcctgtgtaatccaccactcatacaaactgcttggtgttctggccaattctgaagcattctctcatcatccatactctgttcctgagctcctccttttcctctcctgcttgaaataacctttgggtcctccctcatctgcttccatctttgcccatcaacacccttctccacccacatacatacagggggcagtacagtgtcctccgtaaagactgctgatcgtcttagccagggctggtccccatcacctgccaggactcccgggccatgcacttcccacaggctgcattatctgtgtgtgtgggcgcttttggaagtggagacagagcctagggtattttcccacagtgttctccaccaaagagtcccaagaacagggcatccactgagggactgaaggagcgagtgaagatatttacagctttattagagaaaggctcatctgtcatttattacctcctcccaaatcttcaggacagttttgctttaataattcactgtgagtgtgcttggggaaaatgtctgatgctggcttctggctagaggtaactcaacgtaacaggcatgtttgggtcatgccagaccctggggtgagttttcaggacacacacatacacttgaaaaataaaaactctccttttatagtctacgaaggctgcagcaggggactgaatcctcatcagatcccataataatcttaattgttctggccagaaatgggcaactccgtagtagaacacagtattctcacgccaatagtgacggatgtgtgtctataaacaaggggttagggacccccctggagtcatgacttaaatgggcctgagagaagtgggaagcgtcaggtttgaaggcagcccctggacaggaataatgtaaggacgcagcaacctcatcttaggaatgaagtgtagtcttctcgttacagaagctacctccgcctgcagacacacctccaactcttttttagctgatttattttgctcagggagaaaaagtttaccttgtagtagcaatgaaataatttttatgtccaagccatgcagagcagaatgcatttctctcaaattcatttcctcgaagcagtctattctaaaccagaacacatgtggtatggttcttaatgtcctttttcccaacaacttgtggaagaaagttctcaaagaaaatattgttaggcctgttatgactccatttcttcctgtgacgagaaagtctagaacttaaagaggcaaactaatatagcttaaaaaatattaaaaaaaaaaaccctaaaccaggaattaggccacctagattctggtcctggctctgcaatgaattatccatgtgactctggcaaattgtttggcctcagggtcatggttttcccacctgtaaaatgaggtgatcgcagggcatggtcctgtggtttctaagagctccactattctgcaatcctccagtgagcagagctctcagagaccctgtggctgcacacagggctactgctactctcaagcagcccagtccaacttcacaatggggcctgataacatgcattttacatgcaatcaaataccgtcacccagtgaggcccgggtgtttggtgtggctccctgcgagcaatcctcccagccacagagtcgtaggtgaaagtgcagcacactccgcagagactcaagggtgtgagggtgcatctatgcagggagtgagggcacctgagtgtggacaggtggggcaacagcagggcatggcaaaatgaaattcccgagcttcggtgctgtcagccagaatacaacattctttctttaacagacgcatatttatgtgccatgcagaccctgggtgctggcacaaagagatatttaaaattgctttgaaatctattttcttaaacagaatcacttaacctgactcatgaagggaagagttgcagtcagtcaggtgcaaaaatcatgaatgagagctccacaaagatggaagaacatggaggaataagagagcactgggcgtcgaagacccagaggcctcagcacgaagccagcagctcatccacaagctcagatgcaaaggaaggaccagtgtctgtgcccctcccgggtttcctcccatgcttctgcagagccactgagggtctcgcctagaggaatggcagccagatgatctgccaaatgaagaaagctgcctgggaagccatttgcactttaaggaaaccagtatcccctgaaagtcggtcttagaaaccaaccaaccaagcaaaaatgaccccaaaccagagacccgaaaggaccacgggtattgggtagtctctttgcttcatcccctcggttggccattcttttctgtgcaacctgggattaagccgggttcagggtgtaatttccgaatggcaactgcatctcccactgcagttagcgtcactcaactgcttctcagggttcaaacgcattgtgtcactcacagcctccgttagcaagaccagagagcagaggggtcccccaacaccgtggccaggcgtgtcctgggaaggggttgagaacattacggtgactgtaagaaatttaaattgcacatatttacagaaacagaataatatttaaatcagtatgtaatgcagacggccaggggcagatgggttctcatggcattcagtaccattgtggcaagggctgcagatgagagagtgagaggccgcaaagcccatgaggccaacacctgatacagctctttaaacacagcccgaatgccggcggtaacacagcaccgcggaggtgggctaagaagcacgtggttatcgaacgttgtcattcatcacagcttcatttgcgtggaagcagagatgactatgctgctgcagacaatgttttgtgtgcttttcatgctttacttatgggatagacatgatttctcattcacagaggagaacagtgggatatttgtgtgagttcacatagggagaaacaaatagcgctagcattcctaccgagataggtctgaccccagatgcaattcacttttccgaggatttgggcatctcttggttctaaattaaatcttatttctgagaactttaaaaatgtgcttcataaggaatccaactgacctgattgagcacatttcggggaacatgactctagaaggatgaagcgaggtatggaaagaagaaaaccaaacaaactcacatgaaaaacttcttaatttattcgaaaggcagaagaagtagtgagctcgaaagattttgcagtgatgaaaagttcagaaactcccagtttctgggtgaactccttgaaggctgcaatgcacagggtcaaggggtccgaagcagggagtggagtctgtttgccctcagatccgcttgggtctttgtgcccagaatggatgctggtggagaaacacttggtgtttttgtaccagactcaccaggtaactgtcgccgagtcagagcgggtcatggcaaatgtttagtgggtcagccttacacacagatcttattttgagataccaagatggatagaaaggagagaaaaagacatcatgactgtttctgaagaaattgtagcttggaaatgatagcttggtttggatgagcagagaaacgcaggcaaggaaaagaatcacataagaaggcggtggggctgagtccgaggccggatgtgaggggtggactctgtaaacggagcctccctgagtcagaggagactgcaccgaaaggtgccctctcaaaaggactgtgcaaagggtggctccggtgtgcgtgaaagaccaccgccaaagagccgggatcccacactagtgtggatgcctgtgcgctgtgatcacaatgagacaatgataagaccctcttcagggagtgaagtgcgtttcaaaagcacatcttaacgaatttaaataggagaagcaaactatggagtgatccttcaaagcacagaagaaaactccatctatagactccaaggtgttaagtccaaaataacgttcctctgaaatccatgacagaaaaacagacttctttcttagagaagttttctgagaagatggtggaaaaactaaagacatctttcttagctactaaatgttttcttaatgcattcaaacttccagggcctgtacgaaaacctaaaaacacttttttttcagaactcagagaaacatagaatgtgaagtgtttgttataagattcaaagttaaaactttgtggtgaaaaatgtatttctgtatgcacacacacacatatatattctctatatctggaataacataataatagtccctggaacttttcaaacagaaagaatgaatggggcacttttcttaagatatttctgtctaactggattgtagaaagttctagatttcctttttctcttgtcccttaactaaaggtttatatgtctcaccaaatggcaatagtgttttaaccactttttagccactctgagcccttcattttgattattttgtaaaccccaaactgttgttttatttttaattattaaatggtgctgagacaggtcaggttctggcaaacgggaaaagctgatttcaccaaaagattttgcagtttgaaaagttgcgatggaaatgcttcataaatgggcagcagagcaaacccagaagctcaggaatgcgtgagttctgagtgtgggttcttatccttgtctgtgctcacaggtgggaagtcagagaggacctggaagccaaggatagtgcaagttccgagtgggggcctcatccatgctcatgagtgggtggtcagagtggacccagaagccaaggatagtgtgagttctgagtgtgggttgtcatccttgctcatgggtgggtggggactgtgggatgaggaggagggagaagaccggacaggaccatgtcgagtctggagggccagcagtaatgcagtttaaggaatgaagccagattctctttctatgagcagggcatgtctgccagccagcagcccggggtgcgagctgtgtgagcatgtgtgttggtgagtgcgtgagtgtgtgtgtgagtttgtgtgaatgtgtgcctgtgaggaagatagagacagagaaagaaggacagagacacagcggccacctgaatgagcacaccaagatcaacttgactccctgggtgacaaagtcaatcctcagcaccgagcaacacgaatgactccatacatgcgatttcatgggtacagcttcacctttcccccttcttctctttcctgtgccttgtacctgacacatggaattctaaataacaggcaggtaccgaatccatcacagagtgaaataatatatttgtaaaggtgctgaatccttgggaaaatttagaattttctctggaacaaaattctataaattctcattccctcataaaatggaatgtaagaaataactcaaagccattgttaggtttttgcttactacattaaaatgtggactgacctttctcactttgcatacagcacaaagtcaacagagaaaagggaggcgacgcaggagggactcagatgtttctcagcacgtctttaaagaaatgaagacaccccaagggtcctgcccagacctctcctggctggaatcaaggtcctgatggagatcatcatggaaaatgcagccagcacttgtgccccatggggctgggctgggggaacaaggacttcagccctccagtgggggaggctgagtatgtgcagggcggacgtggctgggtggcctctgcccgggacggatgggctgcaatgtggactctgcctggcttggacactcccacacccactccagtggctcagccttcccggactggcttctgttaatctgtttcccattcttttccttttaaattgaatcaggcctgagaggataaacacttccaagtgaaataaatcttggtatttgagggctattaggcttttcacctgcttcttcaaaaagtctctacaaaaacaaaaacagaaacccatggaggctggttaggggaagcagcactttaatttcagggcggtgctgatagctgggccatcgatctgcaggggcaggggatgggccaaggcctcggcgggggttctctgtggcttgggccggcggttaaatgaaatgaatggctcggtcataaactggttggaatgaatcaattgagtcgaacaaggacaggatcatgtgctgggagagtgagaaccaaataggtttgaaggaagcataccttgaaaactacagctgccgcaagctcttgcaatcaggaaactgatgagcagttaatttgtgtgaaagtaggggaaggtctaatggtggttgcgtgataagaaacaaggctgtggattgctgatggagcccatcaatcttccaggagtagccgaacgttccctcgtcacatgagtaaggaaacgtacgggactgtgaacccgctgggcttccggcacacaattagctgatgccatggtgcaccctggcttgtctctctctgcaagcattattttgctaattaagttgtagacactttaaggtcaaaggctctgtcttagaccgttttatgtggtgggcacaagaataatatgatatcacttatgttaattaaggatactattataagtatcatattaacattaacaaatgtttattgttgatttctctagcaaatgatcattccaaacaataaatatgttgaactttgacacgtgaaagtttcagctaactaattgtgatcaaagtctaaaatgaagaaattacattttttttaacacgttatttgtatcctatggcctacttcccagctgcagtcagcacactgagagcctgagtccctcttgcctcccatgggtcatgacattgccttttttttttttttttttgacaagtctcgctctgtcacccaggctggagtgcagtggcatgatctcctctcattgcaacctctgcctcctgggttcaagcgattctcctgcctcagcctccctagtagctgggattcaggtatgtgccaacacacctagctgatttttgtatttttagcagaaacggagtttcaccatgttgtccaggctggtctcaaactcctgaactcaagtgatccacccacctcagcctcccaaagtgctgggattacagctgtgagccaccacgcccaggcgtgacatttctgtcacagggactccagaggtggcttctcctccctgcctaagtaaaggaagagtttcctgaattgtgagtcatctcgtaaatatggccactatttgcatattcttacacagctatctttgggacttgattggatctcaaagctaacataataataaagctgcgatccaaaattctcagacttaaactttggcaccaccaagacagcctcattattctctttgattgattttataagagattaaagttatgcattagattcaaaaataaatttttaatagtgcaaacgcattaaattatttaaataatcatatttttttctgcaaaaaaaaaaaattgaggacaaggattttcctgccaagagtataaagacccccgggtccaaggctggagacagctcagccgtgaattgtgatgaggattcagggccgggcaggagggggctcaggtgccacaggagtcacacccttgctggccgggggggaaaaccacccaccatgtgcctccactcctttccagattaatgaagcttgaagaggaaaatattaaagttgccagtgcgtatacagtgacagttctaaacggagcagttgaaatgtttgcttgtcacatatgccgttggattcacagcctacttttaaaggctctgagcagatggcactttgcttataatatcatttctcctcaaatatagggtaaaggaatgcctcaaaacacaattattttaagtaaaacaatataaccaaaaagaagccttcgtgttgtcccattgtctgggcagcaggatgtgagggagtcactgtgctgattcgtatttttggacataaacagccagtggggacctggggggttgagtcccagtgaagcctgtgggctcttctgaccaccctgtcccactgtcagcctcacacctcatggtgcactcagcctggctgcacccttggccagggctgggaccccagtgggagctgcagccttgggcatgggtgggcagagttggggacatcctcgttgctgccctgacctcccctgctgttccctgacccggttcatgtgggtcccattccaagctccagaccttgggatgggcagtgaagggctggagaccctgagctgccatattcccccagacaacactcagggatggctccgagggcaggtgcatttctcactgagatctgcaccaatggaaatggaaggtacattggtggcttgaaaacatcactgtggcaggaaagcagcagcccagcggggtccctccccgccccccgcctggccttctgactgtcatgtcacacacactcaacatctcatccaaccccctcctgcaaaaaataaaaagataactgagggtgattgctcattaaacgtaaagggaactcctactgtactggctcagtttgagaggggaatggtgacttacgttagcgctgactcaaccctgaccctgtctcatcactgacatcacaaagcctttttatacaccttcttggtttttctacttctgttacctaagctgagagacagagagctctttccaaacattttaacgtaaaaaagtagtaatgattacaaaccaaaaaacattttcacaaagaatacaattatatatattggaaaataagtcatgttacttcctcagtacattttgcaggtgatcagtgactatctgaggctggtgatgcaggggtaagaagaatttcccaagacaggtgccagcaaagaaaggcagatttgttagagaaagtaggaaaatatgctgcaagaaagcaatgggcagggcagcaagagaggaactggctgccaggagatgaaggcttgctggggattttataggatggtgcttgtgctggagagggaagtactgataatgcccaggttgcagtgagctaacttgcatttttctatcagctgaggcatttgatgagacgttgaattgtttgatgataaattaggcacaggaagattgtaggtgagttacctgcacaggagggctacgtgccctggaccatgaagagaggcagacttagagcttatctgcttcctctgtttcttttccttggtcctgccaacctgacttgttttccctaattaggactccacagtaccccttcacccagacccaagttcaataatgtctgtgtgtccctctctggggttctttacacacataggggcatctgtattcatgcgatatttgaataaacagacatcaccacaataccctcaacaacacttcctagagagcatcccacctcatagacctgcctattgttttgtgtggacataaaatattccattgtgatggtgccctgcagttcacctaacttgatgggtgttcaggctgtccacagcaggcttttgctctcaagaaatactgcaataaacatccttattcaaaatctaatttgctgcctatacgcatatgtgtgcaaatatatgagccatttgctaagatggacttgttgggctagagatacatggatttcagattttgatgatgttagattgctcgccaaataacagtcccctctacagttacgtaggggtctctattttcatctctgagaaatttaaaaaatcgtacaattgatgactccactattaaagaaacaatgatttcagaaagaaagaaatgtggggtttttttgtttttgttttttgtttgtttttgtttgtttttgccaagactgctcaccgaagtctttgctaacatcaataaattgctatgggaagaaaagaaagcattgcacattaaggtgatagctattcttggtcaaaagccactataaaaaagccaagtgaaatgagagattaatttccattgcgaatttgcagctaatgccacagggctgtgcagcttgtttctcagctcgtaggagcacatgctcagctgaagtttaatgatattttcttgcacaagacacagtaccagaaagtattgttttgatacctaattaaatgtgaacaagccgttttggatgttagcaacttatgacatatctgcttccagatattaaatacaagttgtcgtgtgtgggtgtagaattgctgatccaaagcttttgtgttaagaaataaaaactctgcatttggtcagacagggtggtgagtgtggggtcccaagcagagagccgtggagctctgaatacttgtaatgatgcagtgacaggcatcagaattccagaggtgattactcgttgccagtccttctacagtgcaaggggttcttgagggctggtgaaaaataactggaaggagagaaaggcagataggagggaaaggaaggcagcccctgctctcctccttgctccttcctgtccccatgctcagtggagcactgccctgctttgcacaccccacgtcgaggaagcccaaggcctgctgactgcaccccgtggatgtcttccatgatccgatccctctgggccggcccttcctgtcaccccctccccagcctgcatgcacactgtcattcggcttggccgggtctccccgatcctcctccctactcttgcaccttgacagtcctttctccggggaccaccgcgggtctcatcaaaacgcgcatctatccctgtgcccggcagtctgatgacgccaggcaggtttgcccctgcctgcctctcaaccccacgctgtgcccctttccttctgggtgcgggtgacccaacccctctgctattatgggctgaatggtgtccccccaaattcccatgctgaatccctaatccccaggacctcagaagggactgtatttggacataccaccttcaaagaggcaattaagttaaactgaggtggctgaggtggggcttcatccaataggacttgggtcctgataagaagaggagattggggcacagacatgcacagagggatgatcctgtgaggacacagggagaagacaccctctacaagccaaggagagaggcctcaggagaaaccaaccctgatgacattttgaccttggacttccagcctccaggactgtgagaaaatgcatttgcattggttaagctgcctggtctgtggtcttttgttatgacagccccagaaaatgaatacaatggttttttactcctggaactcatttcttgtgtctcagagtctatgtccttcttctctgcacttggacctatgacatccaagcagagactgctggctacaggctaggacacactccatgacatgcacagcacatctcacctgtgatgtttaatgctgactacatgttgaaggggtaacaattgcatctactgtttactgggctaaatagaatgtactgttcacaccaacttcacgtacttttccttttcactgtggctcctagaatcatttcaggccacacatggctccctgtgtgctcactggggctggctcaactgcttgctctggttcgtcccgcaccacctcccaccacatcccactcagagccataatcatccctctgtcttgctcagatattagccctgattccacttctgtcccctccagatagggcagctgttgctgctgcctgatctcagtcacctgtgctctctcagcctccaggtcattactaaatgtgtgtgtgtgtgtgtgtgtgcacgcatgcatgtatctactactggattaatgtccaccattttaaaaaacattaagtttcaaaggaaagtgtgtcttcagcgctcgctgctgtctcctgatgcacagcacagtgcctggcatacctttagggctcaataaacagaattttcttactgaacgggtctgaatcccattgtgtgttcagtagtaaaactgcagtgaacatttctgtcatcaggagcaacagcaagtgtctgaggattagaggttagaattcagagctatcacctaaaagcatcacatggacatttaaaattctcagtagagcattttttccttctaatgaagctttcctaaacctgtgacattggtttaatttgtgcaggagtttcctccttgtatttgtttaaatgcccccagaagctcggaaagcaggaagtggtttgaaggggattcagacaaggttagctggggaggccgtcaccgggagcctgagtccatggagtcatctgttcttgggccacttttagattcagcctttgtggacaagcaggggtttccataggattgagtccactgtcccaaattcagcagggatagtttttgctcaaggcatagaatgttaggaaaaggctggcagactacggagcaggagtgtttcctcattcagtagtgacagccagtgaaggggaggaattggaggtccaatccacctgtcagatgctttatacgttcataattaactggactgctaacaaggcctgtctaaagtaaacaccttctctgcttggctcctgaagggctacaaacattttttttaaaaacaataaatacattaatgaatgaatgaatgccatggataacaaaacagtggactgtcagaataagaacggtcaaaatatgtgctaaggtgcagccaggacagaattgaagtcttttgatctcaaggttctatgttagactattttagttagcatgtttgataagacttgcagagttattcatccacaaacttctgggctcacagagctggctttcataactcctgttcctcatgcagcctctaacctatactggacctccccaccctccaggtgctagtcctgaagcctggagtttttggaagtctcttccctctccagaaggaaggatttgatgtcatcacttatacgtggtggaactcatcagcacccgtgagccaactccctcaggtgtttctaagccttttatctctaattatggaacaaatggctttgtctactgttgaaggctgtgagggctccggggagagtaaaagcctggggtttctgacctgcaaggggccttggcaacaatccctactcagcgcttcattttccacatgaacaatctgagtctggggagattagggcttgtcaaggccgccatgtctagccttgagggcaaaccactaggctgttgtgtgatggtcaatgtgggtaagaagacctggagactgcaaaacaggaccccaagccaccacctggagcgctgtcatcttctcctctctcgtttttgtcatcgtcctcatatagtaaaaggataaaaatataactcaaaataataatctgagatacaaaataaattatttttcctattggatataatttagaattacttcttttcaaaacgacctgtgatattgttttccaaaagaagttaatggcaaactcacagatgataaaattcttataaaggatactgaaattcattcattctttaatatatttgactcttccaaccatggctacaaatgtgtcagcttcaatatagtgatattgccttgtttataatactaacctaagactgtcactgcagaagcaaactagagaaaaggttaaattaaaagaaaaattacttcaaatttctatggtagttatattgaggaaacataagaaaaataatgatttattgaaatttcctttaaataatcaattagggcattgtatagtgtctcttgcagatgggcaggctggtcatacaggaatcctggtccaccccacagggtttcccaaagtgtgtaccacggaacactagttccttggaatggcaggggacattgcacagagaaatgattctttagccaaaaagcctcagtaaaacttaaatctttctctagtaatcgacttcttggagcctttaatattttaatctgatgttatgtatcttgtttgggttttcatcatgtaatttttctggttcttttgattattattagagcagttattattttgttcagatttaattccaaagagtatttctcaaaccatattctgtacggttttactacaagcattctctacacagaaatattgattaagcatcacatcttgctgtgaaattcaaagtttttgaaattcatgcttaaaatagcaaattgtttcatatattaattggagtaatgtgctatttagctaatccattgccttgcaaactgtcaggtagaagacaatctcttctgagggtcactggtgtgtatacaatgtgtatgcctattctataagctggacactgatttttcactcttacttagtcttaattgaacacaaatcagggcttttaaactgtacatgcacgacccacaaccggtggcacttccttccactaacaatgtgtctgagtgaagtgtgtgggaaataaatgcaatggccccattcaggggaatggtggggtctgactcaccttattcttggtcagtccctagaataattaacaatcaacactcaaatcgatcaatcctattgaagagattttgaaatgaaactaaaagtaaggtacatttggacaattagagaaataggacaagcacatttacgttttttcagtccgggttttggaagcagcaggagctggacaggctcagagccgagggagggagggttatggggttaggatgagcagatgtctgggagtggggtcttcatgactcacagcaaaggtgaggcctgtgggtgggaagcagagggggcacctgagccacgtgcatcctggggctccttttcacgtgaagcctctgcatggaaggttacacagctccacgcctgcaccgggagggagaccttgcgactcgccatggttctcaggggcagcgagatgaacagggatgtgtgggtcatgggccccccgtgccagatatgactcctcttgggttttgtgcagcgaggagaatggaagcctgaaaacagcgcatctgttcagcagacggttcactcaccaccagcagcctcagatggtcaggtcacttcttggaacctctgattctgaacccacaaaaacagacaccagctgccctgcatggtgaagtgaggatactcttcttcctggcaagaatgggctctgcagaaccgaccaggcccaccgtgtactttgagaacccccttaccagcggtgcagctcagagcagacagagtgacccccgagcctcagctgttctcagcattaacaggctcacacagcaaggagcagagctcacatcagatgctcagtagtgacggttttcttccttttacctcaagctatccactttaggggtcgttaccattgattcagtcactcatttattcattaagagcttattaaacaatctcatatatagacggtgagagtgctatggagataaagaggcagaggcaaagggcaggagcaaagatccatgtgtaggtctgtgtgtgcatgtatacacagaaacatgcatgtttgtgagagtgtgtgcatgtatacacataaacatgcatgcgagagcgtatgtgcatgtatgcaagaaacatgaatgtgtgtgcatgtatgcaaacatacatgtatgtgagaccatgcatgtgtatgtatacatggaaacatgcatgtgtaggtgtgtctgtgcatacacatgggtgcatgtgtgtatatatgtacatgtgtttgtgagagtgcatgcatgtgtgtgtacatgtgtgcatccatgtacacacacatgcatgaggacacacacatgcatgagggcacacacgtgcagatgtaattgtgaaagtgtgcatatgtgtatgcctgtgtgtgggatgcacatgtgtatgtgagagaatatgtgcatgcatgtgtgtggggtgtgcctgtgtgtatgcctgcgtgtgtatgtgtgcatgcacatatacatgcacacacatgcattgtgtatatgtgcatccatgcatgtctgtgtgcatatatgcacacacatgtccatgtttgcatgtagtatcacacatgtatattgtgtgtatgtgtttgcatgtgtctgtgtatgcacacatgcatatatgtgtcacgtttatatgcctgtgtatatgtgcgtatatgcatgtttgtgtgtgcacatgtgcattgtgtatgtgcctgtttgtgtgtatgcacgtgtgttgtgctttgcgtttatatgtgtgcacgtgtgttttgtgttcatgtgcattgtgtgtgcatgtgtagaggcagtgagtgaggtcgtgacagattttatatggaaatacacacatatttatgtcttttaaaatggtggaaattatatatgatttctcctgtttttttactttggtagtgataatatttatgctttaagcagccttttatttcaacccccattcctaacattgtgattaaaggccctttccaattgctttgtcctctgagggtatgttatcagaggtggtagacatttaggcctggcagctgcatcctgttgaactcccagtgtccagcggacctgcccacctggacaggctgtgcctccgctgagagatgaatgcttctcaggcctgcccagggtctggagcctgggtggtagcctcctcctgtagggcattctgctcaggacctgggacctggggctgaactgcaaagaggctagaggctgtgacaaggtggatgcaggtgacccttggcacttctgaccctgtactcccttccttggtcccagcctccaccagcttctagagcaagtttgtccaacctgcagcctatgggccacatgcagcccatgatggctttgaatgcccaacacaaatttgtaagctttcttaaaacatgatgagattattttgtgattttttttttttagcttattagctatcgttaatgttagtgtattttatgtgtggcccaagacagttcttcttctgatgtggcccagggaagccaaaagattggacacccctgatctaaaggttttcatttctgtttcttctcttgaatccacctccctgctcatctgggtgggggctgctcgggcctctgtgtgcgaacactgctgtgggtctggttatttgcccacccacacacctaaacacacacattccccacagccctgtggcaagagggtcagcctctcttccgaaaggaaaatcaaacaaaatccagggaaactgatgagatttccttgaaagcaacatgttccaggtcttctcccctcttgtcttccttgttgctcagttttcagatgccagcaagtcagtagtgtgaacattgactgaacactgagcgagacagacacagagaacacgtggctcaaacctgccccatcactggaggcatcgatgcacaagacggtgagaagaaacttggtgagaaagaaaaactaggaagacattgagaaagtgagaaaagattcatctacacagatcagcaaaactccaaaagaagccccacagttgatactgaaatgctgtcttctctaatgagaaattggctgctttgtgtgtccatcctgaaccccagacaagggtgggtgggaagagaaaccccacaggctccctctgcatgctcccaggatgtgctgcagtgtgagtccccggcgggctgacggaaaagcccggaaccagttggggcccgtgacctgagcacggtgtattgaagccctgatggaattcttcagtggatcctgtcatcccccaaatgccccgactccctgcaacttctctttcgacttgcttactccgtaaccgtgaattcatccctatttgaaggttcctctcaagaagtacagcaaggcagaagtcaggttactgggctgtgaggagcggttgggaatggatagtttcttatgcagttctctaaacattaaacaataatacgcgactttcacctgtcagaaaaactacacacctttgttagaatgatgggtttccaatggttacatattaataaatcaacatctctacctctcccactgccctctctggcttccctctttagtagttactcacatgctccctgtcccacgtaccaacatgtttaatcagatggtaaagacttaaaactccttttcttttaaaattgtaggtgttgctttttctctttcttatgaacagccttaatcaagttttcccctacactgaagatgccacccattagcaggtgcgggacacggaacattgccacccgtggaatgaggaatagagcttggaggccactctgacctttgagagccaccttcaacaaaggcggtctccacagccactggagggggctctgcgacctccgatgtcatgcacagagcatgggggagagacatacgcttcctcttcctgccttccagacagctgaagatcccctttcttgttggaataacaatatgttgctcatggaagaaaaaattcgaacatcctcatccataattcccagaacatccctgggctgacactgcagctgggtatgagagacgcataggagtaaaaacttgatggaaaaagcaacttctaatgttggaaaaaggcacatctgtgtgttgtgtaaaagggtagttaaaggtggagcagaacattcaaaaatagacttaattgtaataaaaacagtgaaggtagaaagagttgaaggggcaaatgacttttaaaaaatttattattattattttttaaatggcatcttgctctgtcgctcaggctggaatgcaatggcattatcttgggtcactgcaacttctgcctcccaagttcaagcagttctccctgcctcagcctcctgagtagctgggattacaggcacccaccaccaggctgagctaacttttgtatttttagtagagattgggtttcgccatgttggccaggctggtctcaagctcctgacctcaacttatacatccacctcggcctcccgaagtgctgggattacaggcatgagccaccatgcctggctgcaaatgactttttttaaacctcatttggtcaaggctgacactgcagtgattttaagcgttatcaaattaaagatgcatccactgccagctgcagcatactgcaatcccactccacctggagaccaggcgctcaccaatacacgcaatcccactctaccaggagaccaggcgctcgccaatacactcaatcccactccaccgggagaccgggcactcgccaatacacgcaatcccactccaccgggagaccaggtgctcaccagtacacgcaatcccactccaccgggagaccaggcgctcgccaatacacgcaatcccactccaccgggagaccaggcgctcgccaatacactcaatcccactccaccgggagaccgggcactcgccaatacacgcaatcccactccaccgggagaccaggtgctcaccagtacacgcaatcccactccaccgggagaccaggcgctcgccaatacacgcaatcccactccaccgggagaccaggcgctcgccaatacactcaatcccactccaccgggagaccaggcgctcgccaatacactcaatcccactccaccgggagaccaggcgctagtcaatacactcaatcccactccaccgggagaccaggcgctagtcaatacacgcaaacccacttccaccagggagaccggggcactcgccaatacacacaatcccactccaccggggagaccaggcgctcgtcaatacactcaatcccactccaccggggagaccaggcactcaccaatacacgcaatcccactccaccgggagaccaggcgctagtcaatacacgcaatcccactccaccgggagaccagacgctagtcaatacacgcaatcccactccaccaggagaccgggcactcgccaatacacgcaatcccactccaccgggagaccaggcgctagtcaatacacgcaatcccactccaccaggagaccgggcactcgccaacacacacaatcccactccaccgggagaccaggcgctcgtcaatacactcaatcccactccaccgggagaccaggcgctcgccaatacactcaatcccactccaccgggagaccaggcactcgccaacacacacaatcccactccaccaggagaccaggcgctcgccaatacacgcaatcccactccaccaggagaccaggcgctcgccaatacactcaatcccactccaccgggagaccaggcgctagtcaatacacgcaatcccactctaccaggagaccgggcactcgccaacacacacaatcccactccaccgggagaccaggcgctcgccaatacactcaatcccactccaccgggagaccaggcgctagtcaatacacgcaatcccactccaccaggagaccgggcactcgccaacacacacaatcccactccaccgggagaccaggcgctcgtcaatacactcaatcccactccaccgggagaccaggcgctcgccaatacactcaatcccactccaccgggagaccaggcactcgccaacacacacaatcccactccaccgggagaccagacgctagtcaatacacgcaatcccactccaccgggagaccgggcgctcgccaatacatgcaatcccactccaccgggagaccaggcgctagtcaatacacgcaatcccactccaccaggagaccgggcactcgccaacacacacaatcccactccaccgggagaccaggcgctcgtcaatacactcaatcccactccaccgggagaccaggcgctcgccaatacactcaatcccactccaccgggagaccaggcactcgccaacacacacaatcccactccaccaggagaccaggcgctcgccaatacacgcaatcccactccaccgggagaccaggcgctcgccaatacactcaatcccactccaccgggagaccaggcactcgccaacacacacaatcccactccaccaggagaccaggcgctcgccaatacactcaatcccactccaccgggagaccaggcgctagtcaatacacgcaatcccactctaccaggagaccgggcactcgccaatacacacaatcccactccaccgggagaccaggcgctcgtcaatacactcaatcccactccaccgggagaccaggcactcaccaatacacgcaatcccactccaccgggagaccaggcgctagtcaatacacgcaatcccactccaccgggagaccagacgctagtcaatacacgcaatcccactccaccaggagaccgggcactcgccaatacacgcaatcccactccaccgggagaccaggcgctagtcaatacacgcaatcccactccaccaggagaccaggcgctcgccaatacacgcaatcccactccaccgggagaccaggcgctcgccaatacactcaatcccactccaccgggagaccaggcattctcgccaacacacacaatcccactccaccaggagaccaggcgctcgccaatacactcaatcccactccaccaggagaccaggcgctagtcaatacacgcaatcccactctaccaggagaccgggcactcgccaacacacacaatcccactccaccgggagaccaggcgctcgtcaatacactcaatcccactccaccgggagaccaggcactcgccaatacacgcaatcccactccaccgggagaccaggcgctagtcaatacacgcaatcccactccaccgggagaccgggcactcgccaatacacgcaatcccactccacagggagaccaggcgctcaccagtacacgcaatcccactccaccgggagaccaggcgctcgccaatacactcaatcccactccaccgggagaccaggcgctcgtcaatacattccatggtatagaggcgtgtgtatgcttggcttgagggaaatgaagaaagactgtgaaatttaaagaaagacaaagagaaagaagtgggagagagagtcatgctcagagttcacctgctgatgtagaagccctgattggccattccctgaagatgaggtggaggctcctttctgtatgtgaccaggacagagaatgctgcatcccacagggtgaatctaccaatgactgataatggaattgttcatccaccttcaaatgcataaggcaaatatacagacttaagtatgagaacaactcatcattgtagcactctgtataaaagcacaatttttgaattaaactcaattttgacagtagtggataaccataacccattcattagatggaattaccatgcagtcaccatgttttagagacgaccctcaaacccctcttgaatacaaaggctgaggagggaagatgaaggaagagggtgagggtctggggcccttgactcttcctctctcttgaggtctctctgtcccagcacctgggcaggtagggaatcccgaaaatctggggattttcctccatgtccatcactctcttcccttttctctccacctgtcttgattaaaatccagattgtccaagcgatggctgctaatccacaaaagtcacccctctattctcagactcactgaactccagtgaccctgctttgcttgagcactgtaagaccttctgcccccattccccagggtacatgctcctgccggcctctctgggccccacatttgagaatgaatgcctcactggcagtgctctcgctgattttctcccacaagttcagacaagatctcagactggccctcctttagaggaatgtttcaccacatgcgatgatgagtatgggttatttttaaaagcagattgcaatgcaagattcaaggtatgaaccacttgctacagttataagcagtaaagaattagctactgttatcttcagatggtagggactcattttcattgtcttactaacacttttcagtattttcagaagtttctgcaatgaatcttcagtaattgtattatcagaaaaaagacacaaacacaatgaatacagaatgattttgagtgtgggatagcgagttgcatggagaagcagacccgttcactgattcactgcacatgtaagcacgtgctacaccaggggctcatctgagttctccagatacagcaattaaaaggaaaaaaggatgagggcttcagtcctagtggaactgagcattttcatgggtggagggcatgggcataaatagcaagggggtgggggctgcaggttgaaggggcatccagggaacacctgatgaggagggtgacattttagcgtacttctaagggaatagaggatggggcctgtggggacctggaggagtggagctccaccccgaggcacagcaggtgcaaaggcttggagcctggatgctggtgagcagtgaggaggctgaggggtggggggagacttttttaagacaagagaaatagtagtgtgtgtttgagtaggcagggatgatccagcagagaggggagagttgatggtgcaggagacgatgcaagaactggaaagtgaggtatgtggagtcacatctcccttaaaaatagaatggggagattttgcatcaaataggataaaacagattattagctgtttagcataataatcttaaaatgattaattgatgattttgcctgaatcctcagatgaatttttcatcttgcagccttgtgtgctttttaggtaagagaacccaatggtcattgtatctgggagcgtttctttgaaagcaaggtgttttttgaaagtagcatttggccatattaagtccaccaaatcttttgaccactgttcactatacactggctttcaactggattcaccttttgttaaatgcggtcaaccacgggaatgagtgaccttgcgactttcacaggggactcactcctaagaggtggtgttcagccagggggaagacctagcaagccgtgattgattttagtttgtttattggatgctacattagctatctattgctttgtgacaagttacctcaagagttagtatcttaaaagaacaaacactatatctaacttcctgtgggtcaggaatccaggagcagcctcactcttgctgtaagacagcggtcctgtccccaacctttctggcaccagggatggctggttttgtggaagacaatttttccatggactgggggctgcagggatggtttcaggatgattcaagcacattatatttattgtgcactttatttctattaatattacattgtaatatataatgaaataattatataactcagcataatgtagaatcagtgggagtcctgagcttgttttcctgcaactcgatggccccacctggggatgatgggagacagtgacagatcatcaggcattagattttcataaggagtctgcaacctggatcccttacaagcacagttagcaataggatccccactcctataggaatctaatgccactgtgacctgacagaaggcagagctcagacataatgtgagtggcagagagtggctgtaaatatagatgaagccttgctcactaacctcctgctgtgcagcccagctcctaacaggtcctggaccagtaccagtccttggcccgggggctggagacgtctgagttaaagcatctaactctggggttttgtgaggggtacatataaagtggtttggaatcatgtgggattattgatattattacaaagaataaatctgatagggtctcagagagcctggaagcacagaatgataaaaaagctagtgtgggtcaagatgttaaaggggcagggagtattgagaacggtgagcttgcatatgccagcctgagcctccactctctcactgaggagcccagcagtttatcatttgagcaggaaaagggtgcaggggagaccatgagggcgtgggcaccacccagccatgagtctcagaggcaataaccccatgagcacagacccacaggcaaagccctgggagaagtcctttcaaagcttttcaatatgtgtgaaaaaaattgcagctgaaatcccataatttcattaaaaaaataaagaaacaaatgtaggttgatttttaaaattatttaattaaagtggcatttcttcacattttccaaacctctgtagcctcagaatggcttagaccctaaagtcctcttgatctaatgacgaaaccactttgacactttgaggacacaggtggatgggccaaggcggctgtgcttggcagggttgcaggggctgcattctacatggtgcctctgcccactctatgccggttttgtggctggggagggtagtgtggtctggaagagtggccggtatgatggacaaggcagctgacgtggatggcaccaggggtcctgggggaccggagaggacggactgggtcacttgatcacagtgtcaccggagccccagggcagcagcaggaggagaggcggcagatggggtgagaagggctgcaaggccaggtaggttctcaggatgttaggcaggcagctgagcgggggttaatgaacagaatgcaatggagattgtttacagacagttttgtagagaacaagcttaatctgaaaatttcagacataactgtcctgaaatgcagggtgcggcaattaaggtgaagcaatctatttattcccatcattcaccatcagatgattttactgtctccacctaaagctgttcttacaaagaagcgtgtgaggcctctcaatattgtgctgctctgagggttccagggatagctgccgtccgcctctgtggataatgactcacagggacaatgagaggtatacttgggaagttatttgaatttggagatcaaattttgctttgattgattttttttttctcttaagtattgcttccctagctattctaggatcagaaagtgacaaaacacttcacggtgaattacagtggtttaatgccttattttaaatttatgtttaccattttatcttcttgttttttgttctttagctgaggttctagtacacatgaatgctttaccagccattagctgtgattagtggagctgcagtgaatgacggtaatgtgagcagcatcaaatgttgacttgcttttatcagagagcagagaatgtacagaatcagctgtgtgctcaaattcactttgctaaaacgctagtgttttcgctccctaccctggaagcataggtgatgctttttctctcctgagtagagcttgactagggtcaaggccatacttatcgacatggctgaccatgtttcttgcctttcagaagcagaacattccatgcatgaaaaatggtgagaaatgggtacaaagagaactggggaataggaacagcttgggagtagaagaggtgagcacccctaggcttcaaaaatctcctctcctttgctgtttttcctgtgggctggcctttgtcccagaagccagaaggccagccacaggtatttacatattcaggcaacacattttgtgctgcagtgatttcttcttctcaaggcaacaaatccaaatggtgttccaggagagtattttcggtaccttttgattcctccaagtatttttatttcaaaggaaaacagtcctacttttcaacaaacagagggcctggcgctggactagaatctgcaggatgatgttgctttctgcagtaattgagaatcagaagcctggtttctcaggtatttttatcttctgcctgtgtgtgaagtcaaaaatcttactccattaaataaacacacattgacgtgctaatcagaaagacaacactggccttataacaggaggagactgatggggaacaaaagaatcacaccctccactgaggacaacctctccagggacaccagagtggtgaacggcaggaagtggggtttttgttgggcaggaagtagggtttcattgggcaggaagtgggattttctttgggcaaagggtttccccggggcctcctgacatggcttcatgcgttcctctcttcaggtacccggtccagagtgaagagggagatacaccccacagaaaaagtttaggatttttatttcatcaaatggatatcaaaattatttcgatcacaacaaacattgtttccagaaaatatgcccttttcccctggattcctttacaggtgcttccttcacgcggtgtcccggattcctgcaccggcgcacagctcagcaccgcggccccgatctgcccaggacctgcccataggcgcctcctttcactgatgccacctcagatccacctcgtcagaggaggcagagggaagactccgaaggaggaatagaggggtgtgtcccacggggcttcaaatcctcatgcaccccgttttccagaattttctgtgaacgtttgtctgccccagtgagagctcatcttaatcttgatttgtagcgtctttggccagtggtcttctcacaagcaggcattttctccacattgtcttttgaatccggtttcctaatgtagcctttgagacgtcctgatgcggaaaattaatcttgttacttgatgaagatggtgtttgaaaatcgatcccgtggcctggtctgttaggtggagagtggttcctgtgcagaactgtgcctcacctgaggacgggcagactcgggctgtctggagagtgtgggttaaccactatacagggatgccttcctgggcttggttcggcacagttagacttctccaaatgtatacatttcatctcctttctttataaactagacatttggctcagaagactgtgaagatgaagcttggttaaagctgtttcctgcaggcagcacagaattcagacctttgtctgattggtcctctgcttgttgggggaccagcccggtccacacacagcagagtcagcactggtcagtgggagaggttgcagggggctctaaaaagagtttctggcctccattttttctcatcatgaaaaatactgtattcagagttgttaacattctacaatgtgttaaagcctaagacccaggtcccttcaggaaaatgacacggtagcttgtgctcacatgagggtggaaatgacaggtatgcaatgctggaaggcagaggcaagccgcagctctgtctggggctctgctccgtgcgggctgccttctgtcccttggggttccagtttctccatagcagagattctagtttaactcgtatcttttgatgcctgttcaaagtggaagattataggaactcaggggagttttctatgttgcaggagaggtgagaagatcaaaggggatgaagaaaagggaccctgggctcccaacgccagggtgcctacctgcagtttaaccagggcagaccccacaccaagccttggtctgagaagcccaatctgctcctcaaaggaaagaatgcatttacttgggaaaatctgccctgactaaatatgtattaattttcaatggaaagggaagtatgaatatgtttgcctccttcctggtcagaatctttcagccagggtctgtgctggcagacaacaagacacaaggccctttagtcaagacgccaatcaagaatttgcaggaaaagctacaagaagaagaatgttcaaggagaggcatgggctttgggggcagccggggtcctgggagacattcaggttcaagtcctagttttgctaaattcaatatcattttagggcaagattttccttttctgtaaaatgggaatagtagcatctccctcctggggtcacagtgaggatttgacgaggatgtacacacagaagcacttggcacacaccacgtcaccatcacatatgaaatcctttttccttctttctacagtcactgcagaatccatcctccagcctgcaagccacacctgtgaacatgcaacccttgctgtatgtgagcagagggctgagggcatgggtggaaatccataggagaggactgtggtggtggacgcaagacacacctgaggtaaggaaaggaggaggccacgcagggaacattttaaatatggagggaggaggggaggtcacgtcgggtcctgagaaaccttctcagcctccatgctgaccccattgatctaaactaagaatgactgtttcataggtatttcctgctctagtgctgaatgagtctctctatggaagtcgctaagtggagacctacttatgttgccttttataataaagctagtacagtgtttgtgctaagtctcttaaggggatggtttagactttctgcaaattgctacaatgtacacagctaattaataacacaagttccctctgatgagggggaaagtatttcttgcctaaagagggatgttgtttagtcttgtaaaactgtagttatgtcttctctacgtcctgccaagcatgtcttcataaaaattagaaagaatccatctgttttcttgccacagactctaatttctttgtgaatcttatttggatttgaattccaatgagcaagcagcaaggtttgtgcaatgtttgttagctgctgactatgatgtggaagccgggctttcttttccatttttccttttcatattgtctttactttggagagacttttgatctgaaggaagctgaattatgtgtcattagaaagagtgaccctaagcacaggtggtgacttgagcttccaaggggggaacattctgaaagtatcttcaaagagtgctagtgggagagttccaatgatgcttcccatgctttctctctgtatagatgaccccatgcctagctcttcttacaggaagcccttggcacgtcaacacacccctctccttcccttacctcaaccagacaactaccttagcagctcagctgtgttattgagacatttcagcatgaaatttgtttttcctcactgaactttaagcagaatttcaagtgccaagtctctaaagccaagtggggctattaagagataattactaattatgctaatttgagaagttgctgctatttccttcctggtcattttatgtgcagctctcctgagagcacagtcccctcgcagggctaataaccttctctgcaaagtgctcagtcgaggacggtttgtcctaaacttccacgcctcaaaaccgggaaggttcacagttgagcggaaagggtggctttaggggagtctatgtcctcattgttaatgatttatactagttattacagcttctcacaggccagcagtagctattcctttatactcagcccagaagagtatatttaatttctaacctggctgtggtttccccctcatcatctctgagtcttaataatggatcccaagcattggaactgtcctcagggccctgcagcactaaatcagaggctggggccttgtgtgacattgataattaccatcctttctccaaaaaagttactatttaggagaaatataatggataagcaaaagcaattgccgaaactccctgggtttgagttgatcctgccactgggacacatgcacccagaagataagctggagggataaggatgagatgcctgggaatccagcctgcacttgggtgctgggggcaccttcccctccttcccactgtccttgccacttattcacggcactcacagggcaggggatagatgaggctggctggtaaatctggtgtgctgatcagtttatctgggttcacaccacactaccatcagcgtggactgcagagaggcacgaggaatgccgttgggcacctgactgtgagctcccgcagactctcaggctcttgcagcctctcagctttcacaccatgctcctaccttcagcttcgtctttactggccagaaagaccaccctggggcttcaccttcactccttgtctcatttctcagcttgttcaggccagtgtgaggaggaggacagctttgatacctccacagatgcttcccaggcctgtccggtggtcctgcagggtcaaatgtaaccaacctagaggatctaatttttggcccaaccccctgtgctctgcatttccatgtttgaaagttagttcttgcaaactctcagggcaccatcagccagtgacgtgtgttactctgaggcctggcccaccccgagcttgccaggccccaaaataggctcacaatggccagggacacgggtacctaacctcagcatcatctgggatgccaggcagccccatctggaagctcagggctggatctcaggtgttagtccttcctgtttggccagtggggagctgacttacacttaaaacatgagaagctgagaacaaactcaaggtctcctatctgtgagaacaaactcaaggtctcctgtctgtgagaacgaactcaaggtctcctatctggaggggaacccgctggacacccggtgccatgctgaggtcacagctctgaaggacgcacctgggaaactcctacccctggcggagaccagcatggatcctaggaacaccaccatagctgatgggagcactgagaatgttgataattggcactgattttgttcttctgctctttgatatagaacatagtctcatagaggattccttactaaggtgttttcctccacttgacaaagaagaaaacgtgagaataacaagagagctggagacctttagagctgatttccagctgtgtgatctgaggcaattcctcatttctcaggaacacagttgtgtcttgtatgatagcttccaacaaataggagttacaggcattgccaaagctctcgaggctaaagatttatttctctttcccatgaaaataagtaatgaaagagtttccctcctgcccaggctcttatagatttacatgcacagcttcctcctttataaggactaggataagaagaggctctgacatttccaggctattccaggttctagtagaattctcatagctgcctagaatttcatacaactctgaaccatgctatcaagccccccaaagcatcctgataagaaattaaaacctagacaaattctctgggtagcttattcatttaatgttagatggatgttgactttggattttccagccttctccaaatgctcataattttagttactcaaaatacacccagtaaaaatacatttacaaattataaatttgtaagatgtattaagaaaatacaacagttgataatgttcgaagctgtatttaaaacagatattctcaaattcgtgcaggaaacttcctccaggacaaagacctcagtgacaatgactattttctttttatgactcaatatttgcttatctcctgacacacagtaattgctcaaaacacgttttatacaacctagcctagcagaaatgcaacagtttattatgtaaaaattaatattttttgaaagatttcacacagctctagcaggcaaaaattacctggtttcatggcctcagttttatacaaaggtaagaagttatgaggtgtattgcagaatatactgcttttttttttctttgcgtgccttctgcatgaggagaggctgtgtggaagcacagggggcaggcacactgtgtgttctcaaagctggactggctgtggtctgtgggaagcaacccgggaggattgggaaagccccccttatcctacccagaaagctcttccagttactgaaaccaccattactttttttttttttgaaacggagtctccctctgtcccccagggaaggagggcactgggcgggatctcggttcactgcaagctctgcctcccgggttcacgccattctcctgcctcagcctcccgagtagctgggactacaggctcccaccacgacgcccaactaatttttttgtatttttagtagagacagggtttcaccgtgttagtcaggatggtcttaatctcctgacctcatgatctgcctgtcttggcctcccaaagtgctgggattacaggcgtgagccacagcacccggccaccaccattactttcactgcattggtcaaaaatgatttttcctactaacacgaagctccttagtcccgacagcagggttttcatcagtcatgtgtacttccctgtgaaatagtctatcaaatcatttccacttgtcaactagctgacatcagattttaatagtggccagtttgagaaaaaaagcatagttgttaggagtcaggcgatggaggctgcagacatggggcgcctggagggtaccgctcacacctgggtgccggcgaggggaccgcacatacctggggaggtgtgggtgatgggaggcgaaggcagaacctgcaaagtcccattcagttgatctgtttcaagaaagcttaagtggatcctacagcgcttgggatgaaattctctcttccccggaccggcatccaaccaccttaccacagaactgtctcgccatgtggagagttagagaagaacattagaacattaatccgggcagtgctgctcccagcatattacagtaggatgggcagggggcgaagcttggtgaaggaggtgggaaaggagcccagtgcactcttgataaatacaaacagagctgccatggctccgtgggtgtaaatggccacagcaggacggtgctgcaagactttctcacgtgggttccagggggttcaaagagcattggcaaagccacaatactcttctatttggtcaaaaagcaatgggaagagagtgtagtgaacctcagcacctgggctgcagaagcctgttaaacaagcgccatggccagaattcctcctgctgcagtacctggatacctccatgggtgaagtgccatgctccggtcccgtggggaacatggaaagatcaaagtcacccttgacactttaaagcaaattgtcaatgtattgcatgtcctcacttccttgaggacacagagagcgccaagttggaggactccggttacagacgtacataaaatgatatctgccatacaagcatgggccagggtcagatgcctggggacccagtggtctactgaacgtgcttcctggagctctgagggcaaagcttagttccttgttttgcataaagagactctgtgtgtgatttcacttaaaagatatttcattgcttcaaaaaacatttgatgggaaaacgtgtctagaaaatttcagaggaaggtactctttggactggattggtactaaaaccaaccaaacaaaaaccaatggacatttcagcagtttctatttaaaaattgacgccaggatttgaaatattacagtcagtgttccacatgaattttgcactgggtggaggaaggttggacgatttagattgcgttcgcagctgtcattgtgaagcacctccgtaaacgacgtgtgagtgtcgctatctagaaccggcatgaggaccaaacggaatttaggcaccatgtattttttaaggctaattgccaatctctctttcatttattaaaaaccaaagctaaaataattcacttactgagcatgtctaatctgcatgaagcctttacttcattggtcaaagctgcctctaggcacgcatctgaaccagccaacgcccatttaatgcctttttgaatctgtgcacactttcagaatgtggaaacagtcttctctgtattcagcctgaagtggtaaaagctacgcctgggtcctaactcccttcttatgtttcttatttaagtaactttacttgtctttcattcttttagatacataccctcctcccacagaaggcaggaagatcaatacctgcctttgcagacctgacacatccgtgcccatctgaaccttagaaagtggctccacgaagcctgtgagggctttcatttacccaggggtgtattttatagctgattctcactggacagcccattggaaccagctactcaaaagccagatgcttcagtgaagccttaacaaggggctattttttaaaattattatactttaagttttagggtacatgtgcacaacgtgcaggtttgttacatacgtatacatgtgccatgttggtgtgctgcacccattaactggtcatttagcattaggtatatctcctaatgctatccctcccccctccccccaccccacaacagtccccggtgtgtgatgttcccaacaaggggcttttatcatcatcatagccaattagtgatatctgctctcattctttcctaagtcaaataacctaattcttttctctctgtggtgtgacatcctggtttggttgcttttattagaaagcaagaagtctctaaatcattctgtttccctttttgccttgactgccaggaagcccagcatttcattcgatgctcagttgcaatagtcttattatccccagatttttccagtctacgtggaagtgtatttccattggcagaactttatctatgccttttatggcaatcctgtgaaattctttttggaaataagtagggtttgaaaatgaaataaaagtcactaagtgtgtttttaatatttgttttttactgtacaaatagattttgattgagaaactttcaaggttgtttaatattaaatgtgatttaaaaaaattgtagatgaaaattgacccccaaatctaggaaatgtaggaaagcttaagtatcctgaagcagaaacccagccagtggttccacatctgcttctcaccagtgtttcctcatctggccttcttctatcatcttacaaaggtcctgagaagaaaatcatatgctagttcttattttcaagcagttgaaactaaacccattaattttatgcaaaaaaacaaaaacaaaaacaggtattagaagtacacagagcactcctggagcgaccagctggtgccgctgaggaagccaggaggctccggaaggttccagagctgccttgcagcacagttaggcaatggcctccaacaccgctgctcacccctctgcctcagtggctggcgcaagctctgcacacccttccgaacagcagcagggctgcagggaatgctgcctgcaggtggtgctgtgcacacttctcgcccgactgctaacttggtgcaccctgttcattccacaactcacgcccagctgctgtatgcacactcccctcccgcccgctgagtcagtgtgccctgcgcgttccatcacgactcatgcacacctcctgtgcacactcctctcccgattgctaactgggtgcaccgtgcgcgttccacaatgactcatgcacacctgctgtgcatactcctcgcccgactgcttactcagttctccctgtacattccatcacgactcatgcacacctgctgagctccaaaaacacactgggcagcctctgtaactgccccaggcagaaagatgctttagactctgaagagccagaaaatgataaacatttgtccaatacagctggagacagtcaggaagaaggtgtgaaagatctaaaaagagcatgatccttggaaagacaatagacatttcagacaaagtaaaaattgtagattacttggtagacagctccattatgaagcagccagtgaaagttcttgatattgtgaattaatcatttgagcatttcctaattttattgcattgattgctaatattaagtgaggcattaatgtatcattccctccaaaacagttgtttaaagttgagataagtttagaaaacatggcatgtgtctcttttccttgggggttctcaatgtgcgttacctctaagaagtcttacagcaaaacaacctgatacatttatataaagcaaaataccccaaactttaaaaaataaatatatattacatgaaagttgatttggaaattttactttactccattacacagttgaagtggcatgccatggatgctttggcagatttaggattctgagatctctgagtatatatcccttatgactatcaaggagctatactgtagagaagatctacaagaaaaaagtctacaaaataaccgtaaagtttacatataccttgaataacaataaaccacatgcaggccttttgaattcactgggattggaagggctaaaggcactcctaaaattcctagagagcattagagagcatgcttcattgcacacattcatgttattctgatcacgttattctgatcacattattctgatcacaagttattctgatcacatgttattctgatcacatgttattctgatcacgtgtttcacaaccaagatgggaagcggctcctctgtctctgcttgggtttgtagtgtgcttttttttttttttttttttgctttttgtttttaaatctctgagctcttcccatttgcagacacagattggcccatgtatttctcaaagcaattttggggcagaaacattgtccagggccctgtgtatttggttgcacagggatctgagtcggggaagccctggggaccccagggcagctgggcctgtgtcagtgacaagtccatcctgacagagccgcaggtctgaacctccctctgcacccactcctcagacgggtcctcactctcagaccctgcgcgagaagggactccagtctctttctttcttttcttttctgttcttttctttcttccttcctttcctttctttctttctctctctctttcctttctttccttccttcctttcctttttccttccttcgtttttctttccttccttctttctttcttctttttttgagacagtctcgttctgtcaccaagtctggagtgcaatggcatgatctcagcccactgcaacctcctcctcccgggttcaggagattctcccgccccagactcccgagtagctgggactacaagcacacaccaccacgctggactaacttttgtatttttagtagagatggggtttcgtcatgtaggctaggctggtcttgaactcttgacctcaagtgatccacctgcctgggcctcccaaagtgctgggattataggtgtgagcccccacacccagacaccagtctttcaatatgtatggctaagggtggcttgcaagctgattttgggtggcatatgaaaaacttttaaacatgtattaaatgccatcttatattttaatgggaattagaacactataatgcaggcacatcaaactcacaagcctatgaataatatagttagaaaaatgctaaggaagaaaggaagggagggaaggagggagggaggaggaggaaaccaagaggcacaaacacagcagcaacagaaagtcgctgtttccatcatgctgagaaaacctaacacacatcataggaaggtgatggccggggcagaaactgaaaatatggaattcaaataactacaactgggggaaacttatatttggtcgtacttttttgattctggagcttagctcttcccactctccatgttccttgcctgtgacttggaggaatcatccagaacgtggtcccacccacatgcatggacggtcaggcttctgctggtagggaggctgcttcctcccagtgttcttgggcacctgtggccccactgccctgggaacacggtggggaatgaacatgctagcccccagggctgacccgaaatgtcacccttgcccttttgtgtgtgtgcatgcctccgtgtgagtccacaatcgagtctctctgcaaatgctgggctgtcctgtacctcctgccccgcctccatgtctgagcattgcccctgtgggaggaatgagacagggagcggcgtttagagattgcagctggcaacacggctctgagcatccctaaagcaggggccagggtcttcacggctgctttacctaggggggcagcacgacccagttgacaggcagaggccaggcccccaggttgtgtttctgactctgccctcccaggagggggctccaggctctggcttccagctcccaggcaggttcttgtggctgggactgtccctgagcctctcggcaagatgagagactttgcctttccatctcaattgattgtgaattaaggaactttggaaatttacctcgattgtagtggtcagattttcctatttttcttagctgtataatctgcctaaaagtttatctttaccttctttttgttgttgttgttgttgttttttgagacggctggagtgcagtggcgtgatgtcagctcgctgcaacctctgcctcccaggttcaagcaattctcccacctcagcctcccaagtagtagctgggattacaggtgtgtgttaccatacctggctagtttttgtattttcagtagaaacagggtttcaccatgttggccaggctggtcttgaactcctgacctcaggtgattggctcacctcagcctcccaaagtgctgggattacaggtgtgaaccaccatgcctggcccacctttaccttctacaatgcccagggcactacagtctcacacactcctctattctcttgctctccaaattgggatcccatcattttacaccactgattcttctctcatgaagtgcaacatttcaaatctttggatttcagaaaaaacaatgccttctaaattgaatatatgatatctatagaataaactaatttgttccctagctccattgaatcagaagcattttatacagtggccttttgataaaaaattgctaaaagaaacaaaaccaaaaattggcaaatgggacctaattaaactaaagagcttctgcgcagcaaaagaagccatcaacagagcaacagacaacctacggattgggagaaaatatttgcaaaccatgtatctgacaaaggttcagaatctataaggaacctaaataaatcaacaagcaaaaaacaaacaaccctattaaaaaatgggcaaaggacatgatcaaacacgttctctaaagaagacaaacatgcgatccacaagcatgtgaaaaacattgaacgtgactaatcattagagaaatgcaaatcaaaatcaccatgcaataccatctcataccagtcagaatggctatgacaaaaagtcagaaggtatcagatgctggcaaagctatggaaaaaagagaatgcttatacactgttagtgggaatgtaaattagctcagccaacttttccaaagacctaaaacagaactaccattcaacccagcagtcacattcctgggggtatacccaccccccaccaaataaattgttctgcttaaaagacacatgcacttatatgttcatcgcagcactattcacaatagcaaaggcatggaatcaatctagtgcctattgatggtggattggataaagaaaatgaggtccacatacactgtggaatataatgcagccatgaaaaagaataaaatcatgttctttgcagcaacatggatgcagctagaggctgttaccctgagaaaattaacagaggaatagaaaaccaaataccacatgttctcacttataagtgggaggtaaacactgagtattcatggacacaggtatgggaacaacacacactgggaacactagaagggtccggagaagaacaaggattgaaaaactgccaggtactatgctcactccctggctgagaagatcctataccaaacctcagcgacacccaatttattcagggaagaaactcacacatgttaactgaatctgaaataaaagttgagtatcccctgaatctaaaataaaagtggaaaaaaataggttaacttgtagatggcaaaaaaaattgccaaaagagaaatctaggggcagtctttatttgaatatttagcagagtaatcggtattgtctcatggatgatggggtgaaatgggacattatttctactttggcccacactgcaggagcatgcgggggcctctgggcccctggacacgtggaaaccctgtggcaaaacatttggaggagcaggaagctcactcaaggcaaatttgggggcagcaactaatatcatatggaaaaagaagaggagctggtataaaagacgtttattaacgtgtgtgcccgatgtcctggcgccactggctcgctgcagtgcttctgtctggaaggttttcagaaagcaaaggcacccacctcctctccctgcacaaagccgctttgaatgtgcatcttcccactgctcggatgaagatgatttcaaaaatgggaattcaattgtggaactttatgaggaagaatacagttaacataactgaaaacaaggccagcactcgcttgaaggaaatgcaggaagagattaatttgacaaacctgcatctccagctcaagtttggccttcctctgcttgaggggatgtcagcagaaagaagggccctggccccagcagagaagttaattcatcatcatcaaaattatgtaaataattcaagtcactttttaaaaataaagctataaagagaagaatacaaaccaaaatattgcaagaggtgacattttgctgtatgtgttcagataagaccaaacgaatgttgacgttgacataaaataattcagaaagaacaagtatcaaacacagactttaaaagtaccaccttactgtcagcgtgttttctatattttcccaagtagctttcacctagtgggattctatttatactgaattaggtgggcttgctgtgtgcatacacatcacagggagtgcaaagacacacacacgctggacacattagtgttaggtacacagattgcaagtgatttctgttggaagtcaattgggactttgcacaggaaggtattttacacataaagaattttatgcattattgcaacggcagcaaagctcacaaaagcccatttaagccaaatgtacagagggccttgtgtggcctcagtgtcacatacaatattatctcaatgatgtgtctgttctggactgagctctggatctcagggacacagcatttgtgctttcatctaccctcagccttggcctcatcccagcccttggtcagtgctcctggggtccacaggactgactggagaggggtccagagaaatcgtctccatctgcccccttgtcgaagttcagcggcatgagagcacccctcattcctggtgatcagagattgatacttactggctcattgctaataaaatgccaccaagaatcggggatttgtttactatatttaaaggtttaaaatgtttaactatcagaagtcctacctgtgagtgtttatgtaaaacgactttataagtaagattgggaacagatgggaagagctattttagtcagttggtgtgtcatgaaattgtgtagactctatttcactgtaaacccttcgttacactgtgggggtgctacaacgttacaacatgttttcttgggagggtcgcacttatttaacctttaaattgacatttggggcactggtcacttagagtgagttcaaatgtcctggctattattgtgcatgcagatttatttctgtaatctacttttcattcactgacttactgaggttaaaatagaacatgcacatttacctgtggcttcaattccactttgttttaccagcactgactctgaatcagttaatctaagaagtgacttcttgtttatgcaggcaagtggatgaaagtatcctctacacaaacacacaggggcacacaagggaacgcagtaggtcctcattgtaaatctacatgcccggtaacccaaagcatgagtatcaacctgataagcacactttgtaattttcaaatttagttccgggttttatcgaatgaataatgtgctgtatttcattccgtttcttggtagcacatcaacttcctattttttctattcttctcttgggaaatagaatgaaaaattccctcacccctcgtcttaattcattgcattccttaaagatttttaccttgtgctgtgattaataattattttggaattcaatgtacttattatatagatatctgaaaaatgaagacgtttgcctatctgaatctagttcaacgacctctgcagtttcctttaaccctcaaatcaaaaacgtgtattacttaagcaagcaaaagcacagtggagtgtgcctatacatacgtgtatatttacccatattcatatacatgtgtacacacacacatacacgcacacacaggtgtgcacatacacactaaggtgtcctatattcatattcatgtgtacacatgcacatacacacacatgcacacacaggtgtggacaacacatgtcactaaggtgtgagctgggctgcacgctattcagtatctccctggaaacgggagcgcatgccccttctcagaaggcccttgtgtgtcatggtcctatgatgtagcttttacggccactgctaacacactgtttctgagacttctgttttaacagcaacatggaagagcttccagcagtgtcttttctaagtggcgattcgctctacattgcccagagaacatctgctcctgagttttgtgctcctgtcctctggggacctgagctctccccgtggcctttctgaacccacctgttcaatcctgctccagggccttggtcccttcttaagcaaagaacagccggtggggccggagggaccaggctctgattcaggcttgctctcaccatctcgctttcttcggtagccacttgcattctttgggcctcacttccctcatccaggagatagagacacagtttagttgatggtgtcttaggtcctttttacctccccataagagagttatgaagcagaccttatcaaacctgggaaaagaactgtcagcgagaagtgagaacggtccgcttgccacctgcacaggggacagcagcccttcttagaatcaccacggttctctccatctttaatgagaaatgggcaccttccaaagggccaggaagggagaaatcaaaaggtggaatgaaataaaactacttaccttctaaccaccctgttagagggcaccacgtggcaaagacatcaaggggaacctaatcagaggttagttcaattccaaaagtatttctcaccctggagacgtgatggttttctagcagtgatgctacagggatgaaggtgggatttatgaattttctggcccttattgaggtagagataatgtttctgggaaaagggcactgataccctaaccgtaagctttagttttcagaaaatgtttccgaaggtgaatttctgtggttttctctctgtcatgggctgaatggtgttcccccaaaattcatgcatttaagtcctgacctgtggtgcctcacagtgtgaccatatttgaagatggggtctttaaagaggtgcgcaaggtaaaatgaagctgaaaacatacagctgaaaagcgtgcagccaagattaaaagcacatgcatgtgcctgtgtgtcctcaggactggggctttttctgctgctggcttttcagctgcacccatctctgcatctggcccatacagaaccatgaggtgcacaattcttgcctggctaattattctaactgtaaagagctgttatctgtgtcctggtggtgtcgaaggacactctcacaggatcaggtgaaagcactcttctccctgagaggtcagggcacatagcctgcctggtttatcttcgttcccaagggacagatgcaccaagcccccaaaagcatctccatcagagccagtcccccaaaccccagcagcctcggaggctccttgtgtgcgcagcagcaggagggcctgcctgtcatcctgggtccccgacagaaagtgatgatgctcctcatttccatggccagggtcccactgtgctctctgcctcagtgagccacagcctggtggggtcctggaagagcttcaggtcccatagagcaataaaagaagaaccagaggaaagaataaattggtctggaagttccatattcaaaatgggggaccctagccacgtctaccctttgtgggagagaggatgtaacctagggtgggggccacagaactttaataagcaggggtgtcgtagggagaatgtggacagccacaatgcctgatgaggggccacaggtacttgctctaacctctccacgccaacgctgtaaaatgaagacaataaatgtcactgccttgtagtgttgttgggaggattaaatgaggcaatgcacatgaagctgttaggacaggataagggctcagtaaatattagttattaatctttagttcctattgcctaagggccaaacggacaatcagttaaacagacgcactgcactgattcacacctgactgagcgcatggaccctgcagagaaggaaagtcccaaccagatgaacctgccaggacatgtcctccctgcatcgtgctaacctcaggggccgcgttaacgtgctgtaaaatagatacatccaatctcatgaatttttagtgaatatattttgcctggaatgtgagtaaaggggcacgtccctgactcctgaaccggagtggtctcgcgatgtcacatggctgtggcacacacgcggttctatttatttcttctccatcatgggtaggggggcctctttctgacatgagcccagactagaatgtcattccttcttgcaaaaatacatcagaataaatcacatgtcaccgcttcagagtcacatgaaaaacactcgcaagtgagtcctgcagcccagaggaagagacgcccaggactctgcggtgggggaagaccccctccccgcgccgggaagagacgtccaggaccctgaagcagggaaagccccccaccacccagaagagacgcccaggaccccacagcgggggaattacccacccacccggggcaacacccgagagagcagggagcaaagacattcacttccaggacagaaggccacgctgccgcactcgtatccgaagtttgaatgtcctcagccgcagatgcgttttttgttatgagtgacaagaacgctgacacaagacactaacctttctagaggtgcgggtgaagctatcctgggaaacactaaggaatcagctcatcccgaaccgaaggaaggtgagaagtcccagggagagaggcatgaaggccatttcttcagccacactggactacggataaaatgttttcatagtcaagagtacaggggctaaccccagaattctactgtgtttatcagtgattacgcataaatatgtacaaacagtatacagcattcaatctgttgactgatttccattttagcaactcgcatttttagtttccctgatgttcaagttttgaggtattactaaatactattacgggtaaggatctctgcccaactgctgcagccaatattcctgtggccaaaaatgagcagagcctaggcaagtagcacatatgacagaattttatttattctctacagtgcggttgggtgtagcctctacatatgtctcctgcttacttagtgtgtatgagagaaaaggaacagacgatagattgtttagattctaggtgatagatgacagatcagtaaggtagatggtagatagttggatgatgggtgattgatatgattccaaagttatctaataagataagaccaagagacatgctgtctacatagaaacaagggaccattcactctcggtgactgtcgccttttccgttccctatccgatatccacagtattgagtggacgtggtgctgccagcaccttctgtgactctatggatgactctgtaaatcgtgtgagacagatgagtgtgtatcctgcttcacatgaccgacctccaggcaaagagatgccgtccttggtcacgaacgaggccatgctctgttgagagtcagagtcctcggtttccccagctgcctggatttttcatgagataggcaggcagcacttgccctgagctgcaagaagccagagggtcctgggccctgggcagtgcctggctctccgtagatggggagctggggacctgcttgcaggtgagggagactggagagcagctgtgcattcaggagggaggagtgtggggaggagtgtgtgcatcccagtgagacctcaggggctcacgctggaagcacagcagaggggccagggagagggcccggggaaggacagcgagggcgcccatcttcaacagagaccacggagaaggcaaaccacattcagacttgctctctggcgtttttagaacatgttctagagcttctgttcctgcttaatctctaccatgtagcacagtgactgacaacgaaaggtgttcagtaaatgtttgctgaatggacagactccaatttacataactgtggcttaaaaataaacccgacagggcgctttgtaaatgtacaatgtaaatctgataataaattctacaacaagcatgtattcgtggtatgcggcgagacaatctctatgctggtttctgggagcccagagatgtggattttggcccccattcttgagaaatcccaacaaaggaggaagcaccaccagcacccacacctgcggggagccccgcagagcaaaaccaaggaagatgtcttctctgctcgtctcgtcaccccaaaggtggtcatggaagccacctccaaaccctactccacgctgagtgctgccctgtgtaaaagacgacagctcagcccatctctccacagcctcccccgaaaatgttcccctctcccagagagttccgattatttaagaaattcttattacaaaaacgcaatcagttttctcagtgggttttaattgagtagctattatgttttgatattgtagaaagaatagaaatgttcaaacttaaaggggtttacattttaacggtttagttttacaaagaactttcatttgatataataaaggaaatacaatagaaatctatttttgtaagcccatctgatgataatttatatatatatatagtgttgagatcacggaaggttatttttgttccctgttcggatttcatgtgtgtgcctctgtatctccataaacaatagaagctcaggaggaagggccgcgtccactccttttgctcatgtcattgtgatgcctcactctttgcctgtctcacggtaggcactggagatagatttacacatgaataaataaataaataagactcatgcccaatacagtttttgtctaaagacacatataatgtttaaggcaaaattgcaaacagagcagaattggatagcacgcaccatactttaaaatcaagtgttctttctgtattggtagccacataaagcaaaatgcaagaaagatgaactttaatcaggcacaggaagagacttggaagttattctttgtctctctttccattaaaatcccttccttcacaccaatgtggttgttgtttctcttttatgatgtaagaagatagattttttttattagtggcaatgacaaaaagatttatttcagttggtgtaaaatatgcacaaagggagactttaaacaatgatgttttgcaatttttacaattaagcaattagtgtttctctccatactctaaaacacagtcacaaaccaacattctttttcattgcctcccaaagaatttgtgctctcagaggtttagtgaagatttctttctctacatgatttttgtaatgtttatattagactgctgctgttctagagctggggagtcttttaatatttcaactttctctatttgaataaacgcttttgtgctttacctcttgagtctgtcatccctctacgtcgtgtgcatatattagacatctgcacaaacacacaagtgcacatgttaacggcatgccttctattcattacccacatacaagagcccctgtcatgatttaacttccctgaagcaaaaatttgattaaaaactcaggtgattacataaaattatatgaactctcacatttgttatacttaaaaacaaagaaccttaacttcctaaatggctaataaatatttccctgcaggtcagtcagtgctgaatatatacccatctttagttcctgagagtgaaacagtataaggatgttggaataatgctttgctacacatcaaagctattatacttctagaggcaacagcttttgctctcagttcagtatcactcagggctgtcaaagtttctacattcctcatgctactgtcttggagttttttcaaaagctactgcttatcctagtacttttcctagaactccaacaatgatgtttatctcaaaattatttcttcttcagaaaaaattggcatagaattctgagaattttcaaaatttctccttgagccatgtattttggattgaaaactctgttagaattctttgagagcctggatagtcctttaaaaaggttatctgtagtagtaacatttagaattgaagcatgaataaaatatctttgtgtctgtggttaaattaggctacctatgtttttctttacctaaggaatagtaaaaggtattgttttttaataaaacaaatcatttgtagatccccaaatttataaaaacaatgtcctttttaattgtacacatcagatagtgtctgagcttgtatatactttacatttctgtcctcagtcctgaacacagtctaacacaaagagggcaggtacttccttaaagaatgtggctattttcacagctataagcccaatgcaagcacagcatctgctccagacagggatgagtgaacccagccagacttggggtttggaggaggtcagaatctattctactgatgtttctgtcatgtttattaaattgcatttttttcccaaatgcaattacacttttaggaaatattgcaattattttaaagagaggacatttttatacttccggtggacttaaactaataaaacctgctttttgtttaatcattatcagcgccctaggtatatgctttgagctctcctgctatgggtctcaagtcctgcttcttagcaacagtaaggaccctctactcgtttgtttttagccataagaagagatttgacttgggttagcattttcaggtaggaggaggctccagtttctgagaactgagctccccatcctattttaataccacctttgagaagacgtatttgagaaatcacatcagacattagggaaatgatgaggcagagcttctgtctgtcggcagtgggaaacaagaatcaaagacttcatctcaaataaatggagcagcacagattaattaaatcgataaattctccaaagcacatcctggttaaggggtttaaaggaattctttccattatgtgcaaatcacctgaaggtgttgagctatcatttgggcataagattcactccatctattagaggccctagagaagtgggtttacaaatagattctgagcaatgttcattttatttatgatccaaatggcaaaacaacagccacagagagaaacctggatctgttttgcaaatgagtgatctgttgctggcaccgttaaaaagacgtgcagtgatgaacgtggccagatttgagttagagatccgtaggagtgagacggtacttaacaccaaaaataataactgccccctttcacctttgcatccccactgctgggtttctctttctgatccgtgggagattttgcttgtacacagtgtggccctcttccgcgtgaggcttcagctggtgtgaccatttgcatcagaactgaattagctgtttagttacacaaacacgagggtcctagttgccctctgccttggaagcagctcaacgaagccacctgaatgccacaattttaagtgtacacagctgaaaaaactttcaaaaatttcacctcttagagagttgaaataaatttccttaaaatctaagtcacctgagcatttatatcatctttctcttcgaacttaagcacacatgttactcttctttttttataggaatgcatgatttattggacactatttcttaagtataaaatcccctccttaatataaatatggaatttagatgatctgttctgctatgttttcagattaaaaaactgaacgttaactattgatcatttttgtaatttaaaacagatgatactaaattccaatatatatgtattttataacccaaagaggacttaccagacattttcctgccagaaactagatactaactgtattcattcaccatcaataaaataatacaatgtaattattttgctgctcttcctactcaatacctatgactagaataaaaggtgattaaatatccacagtgcatatggagggcctgggaaattcagattaactctttatttccaaatatagatcgttcttcagaaaagtctgctatctttgcaaatgaccaaattttaggggctggagggagattgtggatctcttgaaaagcaaacatgtcagtttctaagttgctaatatttggatgtggtttccgggaaaatggattcactcataaacttgcagatggagattcagggcctacgagccctgtttgctagggcgttgcttaaacaatgtcaggcaagcaatcagataaaatagccccgtcctccattccttttaaatcaaataaacgagtaaataaaagcccaattttaattgctgaacagggatgtcttgatactaagacagtaacatatgcaagcagagaggagttctggctccaaggtcctaaatttctcaatgttcccttcccttcctgttttctaaagtctcaccagagcacgttagctgtccctgtgaaccaaaaattttataagcattgtttcttctctttttgaatgtaatgtctctatttgatattggtatgttcttaattgagttatatcaaaagctaggaataaacaatcgcctttgaaaaatcaagtattaagcagcctctgtttctctgagtggagaaaaaacttttaattgtacagatagaggttaatttagtttcattctatttgcaaatacttaacaacacgaatcaggttctcggccacacaccaggcagagtgcagcccctgctgcttttcttgagctatcctaaccacagagacggcatcaacacacagtagtttgaatattctgtgaagggcagccaggcttttcatagttcacttggcattcattcacctttattcgtatattcggtttcaaaatggcaataagcacttataaagtcttgcttacaatgtggaaaattatccttttagaaatcttgtgagctagtaattaagaaccaaatttaaaactgcaatatctgttttgatataatatttttaaatgatgagaaacagagtattacaataattttggttttaggagttgttcaaaattgttcatattgcaaaaatactgacattcattttctactattttggaaaaagaagtagggggtataaaaattgctcaaatgtttcagctgcttttaccgtgtatatacatatacatacatacatagtaatatacatgtatatatataatatgtatgtgtgtatatatatcatactatacagatgtatagttttaaaattgaacattaaatgcttttagggcataagttatcttttcatgcctcaaaaaaaaaaaaaaaatttccttttctatgtttccttacgtaatgcgcttctgagatggttcttctgcaggaaccgagtcacccctgtttagatatggatacacgaatcccatatttttattctacattcaaactcgcacgtcatatctaatgcccttgaagcaatctccaattactgttattacatgggtcactagaaaccagaggcactgatacaaaatttttaaaaagagaaagggggaaaaaaagcaccacacaattaggtgctggttaacggttgaatcaatttgattttatcagtaaatccagcccttcctcttgagctgtcagtgagcgagataagcggaggatgtggggctccggccggcggtgcaggactgtgtccctggccagccagggtgacaccggcggggacgactgtagcattgcaggggctgcggagcccacggccgctctgccctcatcctcagcacaatctttctatttcattaatttttcatggattttcatttcacagcaagccggcgtctgccatccatctgctcgacttattttgttccttttgccaactttttatttgcatttcacaacattcagcaacctgcccgttctccacaccttcccatgagtcatggctttacttttatagagctacctcgtgctcaaaatgtattttcaagtttctaaaactctgtataaccaaccactctagaacaatacctaaatttcaagataacttattttgctgtcaaatgcctcaaagaggtgtcctgtgccaaagctcaaatgcaacccgaccggccccggatgattgcggatcctgcatggccagtcacccctgaagccccttcccctttccactctgtgaagattgacacgccgcttctaaaaccccagcctccaatgtaccttgtggaatcagctgattttggattggccctcaatctatttccaaatatgtttgccttgaaacagcctttttcaaagaaaaattctggaaacttcagtcattttacacattgtacacagtaatgggtagaagattaaaaatatttcatttgcaaaatgcctttcatgccaatgcatagcttcttttagaaaaaaaaatacattcacaaaagagagaaaaacagatagacaaagcagaatatatgcactgttttaataactaaaaacatttaagaaattcctcatacatactaccctgaagttattccagggttcagagaattattggcatattttaaagtgatttatttttatatactctactgttttgttgagttctgcctcttaatctacctggttgaacggatattaacaaaaaaaaccctttttctttattattttttggttaaagtgtatccttttttaatacgtacacattgagctattttctaatacaggcagatattactctatataaccacataatatggattttgttgtacataattaccaagaactataaaataaagtgcaatctcctggtactgtgtgagaaatgaactccaggggtatttagtgatggcaggtaacagtctccataacctccaagtgctactattttccgaacgcctctgagtgaggcaggcgcgggacacactgacgtgtctggcatgtgtcatgggatatgaacgttgctttgccgcgatgtaaaaatgagagagattttccctgtccttctcatagttttttttttttcagcagcttgtttttctcttatatgagagtcaaattttggcatttttcatttacataaaaaatttaaaccatttatgaataatttctaaaagaaagtccctgctgaaaaataacacagaaaacacaaaattgtacaacactaggtcccagtaaaataacagaagtaggattgatgtgtggggagacatattctgagaaccttctttaaagtttatttgagagagaaatacaggttcctgccaaataatacctgaaagtcatattctgtgacgaaggtgttttttttttttttttttttaaagatacatacagctgcctttgtggcatagtaactaaaatataacttctacagaaaaaaatatcatttccaagactatggattatacttaatgaaagtattgtgtcctgaccacccttcagtggtagccccggcatgctttatttcagagctcacagatcattttgataagaagcatatcatgccaaagtcactctcagagtcacacatagaaaaggagccagatgtcaccacactgggaaattaaagttatcatgcatcttcaaaaatgattcttgtcccttagactaggtagaaatacgcatctgacaggcaacagggtcagcatgtatcttaattgtctttattcccccataagaacagcccttaccttgtgcttctgtcagtgtcttcagttagcacctaatagagccacactaaattccttaacagtctctcatacacacgtggattttaaattgtggcaagtatagagttttaatatcagataagcttaaaattgaggttattctattcatttatggttgttaagattcatgacaattagaacataatttaaactcaccattgtttttataaaataaaaaatatcagcatctgtaataactaggtatcatagatgaagtaatcaattcccaggaaaatgcaaataattatttaatgtgtctcttagctggttactttaccttttaatttgatcagttacatctacatggttaacgtttccccaaaaattgaatctttagccgtttgatttgactttcctatcaagatagctgccggcaggtgccctgggaaattctcccgcacgccagaaatctcttcgtaacagaaatcagtgtacaaaacctgaatgccctttcccgcttcaatttttggctatgaaaattaagggacttgacatattcaaaataaccaaggtatggaaatatttgctataggagttttattttgaattgctaaagttaagtttatagcaaatgaagtctttccccagatttcctttttccccctaaattgaatactttctaagctagcatgactgacgcttcctggcaaggcaagtgaatttggagaaaggcaacactttcctcctgtttatatttataaaatgcattattgcgaactattactccacattcttcaactctaaatatttaaatagactaatcaaaaaatattgggaaatgtgaacatttcaagtgtaaagatgatgcttcctttttcctcttttaaaagtcatattcattattcaatccggtgactttctcaatatcaatgccactttgtgttggcattatctttggaggacactaacaggtctgtttcaaaatgataatttcaaacaacaaagtgaatcgcaagcgcacacttagcagctgagaggtaaatgagaaccacaacatcacctcccttctgaaaccaaaggctccaaaaccttttgaggaagttgtgggggccaatccctcccagtggtcctgacgttcggtcataatgaatgactgtttgctattgacatttatgcctgctgactgtctggataatttctattattggaagaggcaataaaggacctggtgacggttcgagggcacacaggaaacggtctggtagaaacttatcttaggccaatgcaaagatgaaaattcttcaggaaagatggacaaccccaaacacacctaacgttgcctcctgctttcaaacaactggcaaagctgatcaattctagctgtgtttttccaaccgttctttatacttctacctcacttaaaaaaaatcagcacatttcaaatcatgattagaactgaactttctcctgcaggctcactaggaactgacaataacacaggttcctctaggagagaagggtcggcatgagaagaatcttttaattcttcctggcatgcacacaggctacgatggcactgggggcattgctctcatattggagcgattgctaattttgcaaaatccccagtgtgaaagccctcccttgctgtagcattgactaacttcagcgcggcccagccccaggaatatcagtaacaaggcacagctgagtttgtcagtggccgctgtcagccggctgcttttcctgctttcctggtttgcggtttttttctaccactaacaaaatatgatgcttctttctgttttcctgtattcatttctgcttatttctccaaggacgagccctgtgttctctttacgacccaatgtttacaaatcgacgggcaccacattgagtaaaaactgccagccaatttggagaggcgatcgcagggcttcgcctatcccttcctccgggacagtttggatgggagtagctggcgcgagggctcgttcccccgtttttgggtaattcctttggcactgggagacgagatggcctccggagggtggaaggcagtgccagcccggccggccactggggactgcggggcccggagacgcgcggggtccccggggagctcctcgccgccctcgccccacttcgtccgggtccctcaaacatgtcgcagcgtggctgctcactgtcccctctgggcaagaggaggccccagacatttccacgggatctgaactcccgagcgccctgcacggagcagccatcccgccagcaccccaaagtgaagctgctcacaacggacaagcccggagaccccatgagaggccggggtggagaagccgggggtgaaggggggcaggggccggcgcgccacgcggtccttacctttccgcttggacctccgcctcctcctcctcttggacttgcatttgagttgactgctcagccctccagaccctctgccgctccccaggaccgaggccatggccgagacccaggcgcggagcccagagccgcctccctcctgcacctgcacctgcctccttcccggcagccgccgccgccgctgctgcgaagcttgaggttgcaaacccgggagcggctcacttttcaggactgagcaggaaagcgcgctccgtctctctgtctctcgaattgttctctatgacttgctcccactgggctgggggcctcggctgggcgcctggagcgagctgctccctggtcagggagggcggggaagggcgcgcggcgtcctgagtgctccgagcttcccgcgggctctgcctcctgctctgggctcccagcgcagggaggctacttttgcgcctct

SEQ ID NO: 29 - DNA, 41 bp, Homo sapiens
actagatgccctgaaaatcaatctgcagcccactccagcct

SEQ ID NO: 30 - DNA, 41 bp, Homo sapiens
actagatgccctgaaaatcagtctgcagcccactccagcct

SEQ ID NO: 31 - DNA, 112962 bp, Homo sapiens
  misc_feature (81032)..(81032): n is c or t
aaggtggacatttcccgggcccggagcacggagaggctgcaaactcctctccagaggccagtctgacgattcctgccccgtacactccttcatccaatcgtattgggcctacacggctcctcacctggggcctggaacttttcggggagcaaggtgacgaatgtggatagtcacaggcaggggcagatcgaagggaaggggctaccaggcctgggcaggagctccccgaggcgaccccgctgcttcggatctcgcggggaccggccctgggaggacggaaccagcatcccgaggagccgccatcgggggcctggacccagctcctggaccgtgcgggctgcgcgcgccgagagcaatctaagaaagtaaggcgcgtgtgcagcgcccagtggcagcgtagaaggagggaggtggaagaattccgacgacaccgtttaacaggacaaggaagaaatgctgtacatgatcaccaggaaaagacaagcaagccagttggacgcaaagcgctcagtgatagtttactcaggagacaacccagaacgtgccgaaatagctcagttgggagagcgttagactgaagatctaaaggtccctggttcgatcccgggtttcggcagctacttttaaattctgacctcaaaaactcaaattttgtaagactctccgtccacgataccctggcccattccttcaagcccaagcaaaaactgagatttgaagggtgaaggaggaaatgaaacagtcgttcctaaccacccccaggagcgaggccgcgccgcatagcccttctgggccgtctcctggcggggctagaagaagctgccgcgcgtgcgcgccacggagcctggtgctgggacccagaggcaccctcggcgccggaagacgcgaacgacccgggccgcggtggcgagacggggccgcgcgccgcctggggggctggtgtgagacccgaggctccgatgggaggaggtctggtctgtccacggggccagcaaaacaccttcatcccaatttcatcgcattccttctaagtatccgaatttgaagaaaaagcaaaactgttgagtggtcagatggcccccacctggcgttgccggtgagcggaacccagtgctggttatttctggctagaggcgcaccgaggccggccctgggtctggccctggggtggcgccaccaggttacttgcccaccggtgaaggatggcagctttacagctccccgacgcatcagactaaagaacgttggccagggtctgcaccggtggttctcaaagtacagtccccagatccgcagcatcagcaccgcctgagaactacttagaaatgcacattctcggccctggataggcagctctggcagtggggcctagcagcgggtgtttaaacaagccacgggtctagacgttcctttctgtttctaaaagaggccttgctttcctaagacagttgctgtgaaccagctttttccttttgctgtcttgcccctgcaagtgtgaaatagaactttgacccgtgctcgaaattactttctgagatttttttttgttttcacgtgtgggtggacgtgggtactcaggggcatcagcttcccagctacctgtgggagcccaccccaaggccaaactgggtgtcctagaaagaaaatggaggcccaggcacctgatgttatcttgtatggctggtgggaactgagccaggacccaaggggagaagttgcagggatgtagatctaaattttaaaaataagaaatatctatctatttgtgtcgtaggaaaatagaatagtcagtttagtgaggtggcgggttgctggacagcagatgaaggaccattgtgagatgtatgcttaggtcttgcttgttttctggttctgctgttttgagggggaagggaaactcatatttatgaactactgtgtgttctctcttattcattcattctctaattggacattaattcctaacctcccactacgagccagcattatttgctcttcataacaaccttatgaagtacatattattatccccattttatacataacagcctttccagggttgcaagaattaagcataagctatgtctgttagacagctaacattgctacctcctaaatgttactgtaagtgaaaagctgttgagatgtgtagtcaagacaggtgtgcataaacatacaggtacttgtatgagggaaataaaagtttttgtctggctcaccagaaaaggctctatggagcagtgggtcctcacccagagaagatatatatatatatatatatttttttttttttttttttttttgagacggagtttcactctgacgcccaggctggagtgcagtggtgtcccaggttcaagggagtgtcctgcctcagcctctcgagttgctgggattacaggcacccgccaccatgcccggctaatttctgcattttttgtagagatgggtttttgctatgttggccaggctggtcttgaacttctgacctcaagtaatccacccgccttggcctcccaaagtgctgggattacaggcatgagctagtgtgcccagccaagatttcttaggtatggaaagatttaacaggagtgccaccagctatcacatttctaaagagtagggaaaggatgcaggttctggggtgatagtgactttcatttcagacaacctgaggtctgagcactctgcccaaggtaatgttagtgatggtgaatctatgcgggtctgcagcaacctcaattcttgcctcctcagaagaaagaattcgactgaagggcataaggcagagtgagagatgaacacaagttttacagcgggagtgaaagtttttaaaaagtttagagcagggtcaggcacggtggctcatgcctgtaatcccagcactttggcaggccgaggtgggcggatcacttgaggtcagaagtttgagaccagcctggccaacatggtgaaaccccatctctactaaaaatacaaaaatgagctgggcgtggtggtacaagcctgtaatcccagctactcgggaggctgaggcaggagaatccgttgaacaggggaggtggaagttgcagtgagctgagattatgccactgcgctccagcctgggcaacagagtgagactgtctcttaaaaaaaaaaagtttagaagcaggaatgaaaggaagtaaagtacacttggaagagggctaagcgggcaaattgagagatcaagagccctgtttgacctctgacttagggttttatacactggcatttctggggtcttgcatcccttcttccctagttcttcccttggggtgggctgtcgcatgcacagtggcctgctagtgcttgggagggaagcatgcacagtgtgtttactggcgttgtacccatgctcacttgaggcattcttcctttaccagctgaatgttcctagaaggtcatgtaccagttaaatgctgccattttgcctcttagtgcgcatgcttcagcttactcgcccaactcctaagatcttatcaggaaactgatgatgaccagtttcaggttttttctgtttggagcctgcctttccctagggctggctgcgaccaattaccgttttagggaaacagtgtaacaaccacttgcccaccacctgttggtctcctgacattccttggtggggaggggggctctcctgctgtgctcatgcctgactagctccctactgtaacaggaagaccagctactggctattggtgtgggtgggggaaggatggaggcgcacacctggttagtaccaaagataaaccagacactaggtaacgtggtaaggacagatggtaatcataatgtactattgcaatagggaagagggtccagcgtgaactgaactttgatttgtacagaggtgactgggcattttaagggacaatgagggattaacggagaggaaccagtggggcttcagcagagtcaggaaggtgaaaactgacaaaggattgacgcatgtaaatgctgattaggcagctgtgtctgctagctggcaatgatcaaagtctggattctgtccttccagagactgggagacactggccctatccttcctgatgattacattgtaaaggaatggttttttacgtccttgattgcctttgtaggagatacacagccatctcaaaggcacagaggaaggagtcacaattgtaagccctttttagtaagtactctaagaaagtgccagaagcctttcatcagatggtgcatagaattcttttgtcagtcttgggctttctcaagcaggcactctgagggggttgaggcctggtctagaagggggctcagagaggcctggctagcatttggtcaaggagaaaatctgtgtcattagaagtgtgaggaggggagggtgaaggggaagagttaggccaggcctccacctgttggttgagaaggcttttcaggtcttgtgacagggaggagtgatcgggaagcaggtgggcagcattaaaaaaatacacacaccgcttatatatatgaaatgaaggaagaccaccatgtgagaaagcaaaggctgtttattcagagcttgctatagcgagggagtcagccaccatcactggcatttgggagagactcaaaggcaggcaggggagtgggagagctttacagcagacacaagggacagcttcaggtgtgccctgattggaggctgttggtctgggaagctggagttagctaactgggagccggcagccatgtgattatttaaggcgccttttgtggttggcctaaagttggaaatgaggacaaaaactaggaaagctgtcagttattaatcaattcctggtcatttggaattaattattataaaagttattgtttagcttctcagattgttatttcccagacttcttgcaagtctggctttagcagacgggcttgctggactgtttattgtagataaggggctggtttcctgggcaggttatggtcacagttctgtttttatatatggtctgaccatggcccatttggatctttggttttataatatatattttacctgaagaggtaacatctaaaaatgtaatctgatcatttttatcatcatcatctgaagcgtgatgtgctctaatagatgtcaaacactgtcacttcccgggagtgaaggctgagaaagactgaacaccaggtatctcctgggaaccccactgatgccatgatcacactttataacttaggaggctatgaagggtgaagggtgggagaatagggtcgccacttactttagagaaggaatgctttcagtgggaaagaacaccatcatcattaaacatttttttgttgttgtttttttgagaccgagctgctataattgttatacataataaaaccagatgagtatttagtaattcattaaggccttttgtgtcatcaatgtgtacatatattaatgctcatttcattagtcttggatcataattctcctcttttaaatggatggtggtttatagtttacttttgttatactatttgtcatatctcagatttatttgatgttgagtccttggccagaaataaaacttctgtgtggatttactacagattccaggaatatacagttcctgtacaatcatccttcatatatagtgtcacagtggattactttgtttaacttccttttctaatggatcatcttggaggatagtctgcagtccctgcttaggcgagggcccacagacagccctgcaaataaagctggacaggctgagcaagggaacagctcttcatctcagacgccaaatgcacactttagctctgtaaattccagtgttcctataatgagttgtcttaaagcagggagcacaaatattttgctattcactacctaaatatttcctacaatgcatcttgagcaaacccgctttccccacgtatttcactgactccctagtccaaagtatcaaaaataatgaaaaatgatagtcaccgtttatggagtgttctctatgtgccgggcattctgataagcacttttcatacaaaatcccattaaacttgtcaataatcctttgagataggaggcatagttgaatacaaataaataaaaaaaaatacatgctactaggaatgctgttgtgaaaaatcagcataattctgagatgtactaaaatgaaacatgagctctaagtataaagtattagttcttctttcatacattgcattaatgagatccataaagagcattttttttttttttttgagacagagtcttgctctgtcgcccaggccagagtacagtggcgtgatctcggctcactgcaacctctgcctcctgggttcaaccaattctcctgcctcagtctcctgagtagccaagatcacaggtaaccaccaccatgcccagctaatttttgtatttttagtagtgatggggtttcaccatgttggtcaggctggtctcaaactcctgacctcaggcgatccacctgccttggcctctcaaagtgctgggattacaggcgtgagccaccgtgcctggccattttgttcagttttgattaactcaacttaaaaggaaaggattaacaaagaataacaacatgattaggaaggggagattcattttaaaaatggatatgaagtaaatttgccaagaggaaagaagctaagggtaatttgattactattttttcagtagtatataatttctaggaagatatcacaagaaggaatgggctcagataaaggcaggagagatttctattagagaaagacaggaactgttctgtcagggtgataagattgtttgacctagttgtgttacaggaaagtatccatctaagattgggtgagctagacaactgctgtccaatagccacgtctgtgttcaaataggactgctagccaacttttggcacttttgaaaaatcttctgagttgtggtttctttgtgcttgctgctgctgatggttcaggaaggaatggtgtggattggcatgaggtgtgcgcaggggtagagacaaaaagggtggtggcctcaccggatgaattctattacctcgttatctcttaacactaagtgactagaagcaaaaccagcatctgtccctgcggctgtgatgagttagtgtgcacatcataatcatgtgccctagtcaggcaaaaacagaaagcacttggcatcctgagataaaccaaaagaaaccatccaacaggataaccctgtccggttagaggccccttaataaatgaagccatgagactttcctgaaagttacttattctatgtcaaagaattttttccatgaccagttcaaagctaatgtatgaaaacgtcctttgtaaataagctactgtgacaaaattgctgttttcccaccgtgaacagagaaactgtgtccttggcaacattggtactctcgtgtgtgaacatgggtgtgttttggttttttgggtttatttcagggtttcctgtttgtttttgttttgtgtttaagctagacttttgaaagcctggacacccttgtttaactttcatgcaagtaaattactttttgttttcctaaatgcttttcacagagctggtcccagaacaaaacatctgcttaaagatagactcagtgttagaaaagtaaaaatcggagaacttcgattgagccccaggcaaatggaaaggtggggaattgaacgcatgaagcaggaggcagtatgtgatgagaattaagagaagaaaattgccattccatcctcagtggccttgtgtgaagggaatgggcatttaaagatggaacgggccaggtgctgtggccctgtaatcccttacacctgtaatcccagcactttgggaggccgaggcgggcggatcacttgaggtcaggactttgagaccagcttggccaacatggtgaaaccttgactcgactaaaaaaatacaaaaattagctggtcatggtggtgtgcacctgtagtcccagctacttgggaggctgaagtgggagaattgcttgaatccaggaggtggaggctacaatgagccaatattgcaccactgcactccagcctgggcaacagagtgagaccctgtctcaaaaaaagagatgcaatgcctgagaattcttggtaagggttgagacatgttaatgtttgaagtgcttgtatagtaacacagacttttaaatgatgtgccctggtaaaggggaagcgtatatgctgctagtctgtttcatgtcagtttcatgattacctggagggaaatttgataggcaagtagactccataaaattacctagaaaatgggtattgaggtactatataaatttacctgtatgaaggcaaatgatggtactgatgttttcctaaaatccatggtcctgcctctggagtcccttccagctgcaatgacccgtgtgtagccagcacagagccccttccctccacgtttgtgtggttctctttgaattaaaaacattttttatggacacataatagtcatacgtatttatggggtacatgtgatgttttgatacaagcatacaaagtgtaatgatcaaattagggtagttgggatatccatcacctcaaacatgtatcatttctttttgttgggaacattccaaatccactcctcgaattacttcaaaatatattaggtgggtgcagaagtaattgcagtttttaaagttgcaaaaaccacagttacttttgcaccaacctatgcaataaattattgttaactatagtcactttattatgctatcaacactagatcttttttttttcttttttttttgagacagggtttcgctcctgtcacccaggctggagtgcaatggcatgatctcagctcactgcaacctctgcctcttgggttcaagtgattctcctgcctcagtctcccgagtaactgggattacaagtgcccactaccacgtccagctaatttttgtacttttagtagagatgtggtttcagcatgttggccaggctggtcttgaactcctgacttcaggtgatccacctgccgcggcctcccaaagtgctgaaattacaggcgtgagccactgtgtccagcctgaatactagatcttattcctactatctaactgtatttttgtgcccattagacaacacctctttatctccacctccccactactcttctgagcctttggaaaccatcagtctactctctatctccataacatcaattttttagctcccacatatgagtgcaaacatgggttgcttgtctttctgtgcctgtgatatttcacttaacataatgtcctgcagttccacccacattgttgcaaatgacaggatctcatccttttttatggctgaatagtgtgtaagtaccacattttctttatccattcatctgttgatggacacttagattgagtctgtattttagctattgtgaataatgctgcaataagcatgggagtgcagacatttattggatatactgatttccgttcttttggatatttacctagtagtgggattgcgggatcatatgatattctattttttttgttttttgaggacccttcatagtgtcctccacaatgattgtactaatttatgttcccaccaacagtgtacgagggttcccctttctccacatcctcaccagcatctgtcttttcgataaaacacattttaactggggtgagataatatctcattgggttttgatttgcatttcttggatgattagtgatgttgagcattttttcatgtacctgttggccatgcgtttgtcttcttttgagaaatgtctattcacatcttttgcccattttaaaatcagattatgtgcttttttgctattgagttctttgagttccttacatgtttagttctctttgatctcccacagtctttctcatctttacaaagcatctgtaattattgattctacttttcaggtggtgtcttaaatggcccaaggaatatgtttttctaacacttggacaatgtgaccaaaggtttattctctttctgcaactcttagtgcccagagcagagcatctattccacgatttgtcctttctttcttccttctcatcctatcttctttttctatctctttcttccacctcagagatctattctcacatttaagagttggaaatttgaaacaatgttttacattaaacacatttttttttttagaattgataattgagctacatggtgggaaattcaatcagaaaaggaagtacacaatgaaaaagagtctttcctgtagctctaagttcccctctgcagaggcgatctttgttactggcttttagtgtatttgttcataagtaattgttgtatgtctatgtacacatttctatatatatatatcacatttaaaacaaacagtatcattattatgcacaccattgtaaagcttttatctaaagatgcacattacttctcctttgaatgctgacaacaccatacttttcctttctccctttttttttctcaccgattctaaacctgagctgagctttcaaaccatatttttgtattcagaggcagtctcacccaatagcaatcatgtttatgttccctaattgattcaaattctaaagataatgttggaaaggaatttaattttaaatccataaattatatctctatttgaatagtctgatctcttatcccaggaacaattattttacaaacaataattttgtcatttgtaaaataaataaaaccataaaaatttggttttatttcttttacaaaaggaagagctgatttgttgcgcaggtttagctttgagtatgcaggaatgaaatccaggtgtacagtaacacagaagaaacattcctcttttaagcattttctaataataggttggtaaattgctcatagagaaatgcactcagatgcctgtttatttcatatcttattcctttagcgtcaccttaattcctacttacctttcaagttctctcaggtttttcctcttcatgaaaagttttccatagtttaagctaatatccagctcttcccactctgaccatcctgagagcttgccgtctgctatgctctgggcatgtgatcctgtcccaactttcattctctgtgttgaatgtgtgctttcttcctcatagcaaaattctactgcccctcaaaaggtgggtttgatttcaggaagaattttcatgttctagtaacaaagcaggggactaagaattttgtgaaaagtcataaaaagtctattggagttctttggaaatgcaggtgttaatgtgtcgcctggtggtggtcgggactgaaagatgttgtgtgacctggaatagctggaggggtgtgggctgataacccctagaagctagagtagtgctgggctcttagaacaaaaggaaaagggtaaggacaacagggagagccaaaccgcacagatagaaacagacaaatcctaagagtgagggaggagaagcagctgagtagcttagacagtttatctaacatgttaggatggggaagcttctgaaaatgatcttcatcccaggtaaagagagaaactgcaacaagagagactgaatgcaacttcattctttttcaatctgaggtctcagttgtatttgtgatgggcagtggacagcccataacctgaacgaacctggctgaaaaatccaagttcagggctcaacacaacggtctatggtttatacccttgaattcttacattgtagcaaagacggataatgcaccaagtccatctgcttttctcactacaatagatgaagaagagggggagatgtggtataaaaggaggcaggggagaaggctaataccaaggtattggggctatgtgtatacatatggcttggcggggaggggtggtgggaagcacagcctctggaggcaggctgcctgggccagagctccaggctcaccccctgcctgtgtaatatccagaagttccgtaactcttctttgtttcagtctccctgtctgtaaaatggagaaaaataaaaatccttattttatagggctagtgtgagaattaaataagataatccatgaagagtgcttggcatgtagtcaggcaggtcctgcaggctcagtaagcactctctacaagctccacccttctttcaggagtcactttccgcaacatctcatcttggctgcccgagaaaacttagctgtttcttccatcctgtactccctataccttatccacacaataacctggatatcatcttctggttgtgtattttattggtctgattttctgactggctgctattatctccttaaggtcaggattcacatgactagcagaaaactcatagtaggtgctcaatgcatttttgttgaatgagtaagagtacttctcctcttttttcatcctgccaatggtgggtcaccactgcatcataatccttggctgtacttgtttttattatatttcctaacatgagaatcaactcttctgagagcctacactgacgttcttattccttttccacatcttatgtcacctagccaagtgccagaaacattttaggttctcaagaattgcttgtttacatctattgacttaacagtaagcaactatttcaggactaaaaaggttgtatggttaatttaaggttatggatgattttcagtgttttcgtttttatttgtttttttttctcacttgcataatttgtagaaagcaataaaaaaggctctacatcttcttcaacatggcagcacaggagagcaggaagctgtaagtctttgttagtacttcaaaaagatcatgggattgtcttaatctaacagagacagagacaagtttaggcagtttaggaacggccatctgccaggacactaacttgggttaatttaggttgtaatcctatgaaccaggatcatagtcacacattacatggttgacattcaaaaaatgtcttagcaacaacagcattctccccatctttcaagttactagatgttctgactgctatttttaaatggaaggtttgaagaactttctagagaaatgagatttgggaaacctttcagatgtaactgagattgagaactaaagattttgtgttcagagaaatttaaagaaactaacagtctggcacaaatagatacatgtcctaataatggaaacattttacttgatccgccaattaccaattcaattattcttacagggttaccaggtgtgttagcttgttttgcattgctataaaggaacacgtgacactgggaaatttataaagaaaatagatttatttggttcatggttctgcaggctgggcaaacatggcacccacacctgctcagcttctggtgaagtgtcaggaagcttttttgtttttgcttttgaggtggagtctctctctgttgcccaggttggagtgcagtggcgcaatcttggctcactgcaacctctgcctcctgggttcaagcaattctcctgcctcagtcttcagagtagctgggattacaagctcccaccactacacctccgctaatttttgtatttttaatagagaaggggtttcaccatgttggccaggctggtctcgaactcctggcctcaggtgatctacccatctcggcctcccaaagtgctgggattacaagcgtgagccaccgtgcccagccaggaagcttttattcatggcagagggtgacacagaggcagatgtgtcacatagcgggagagggagcaagagagaggaggtaccagaccctttttaacaaccagctctcatgtgaaaactcatagactgaatattaaatcatgaccatggggagggcaccaacccattcatgagggatccaccccaagacccaaacacctcccaccaggccccacctccaacactggggatcacatttaaacatgagatttggagggaacaaacatccagactacatcactaggttacactgggttggtctttagcaggcatgtttgggaggtcccctttgaagagcagcttcttggaggcatcacaggccctggctgctcccagaacattactctgtccaatgtcaatgttaaatcatcaggtccaggccttttggtacatggcatccttgagggtcggatctatcaaccctggtcctaaactgtatcgaccattggctcctggttgcagccacatttctgaacacaaccttttgtctcctggaccttaaataaaaggctaaatttttctaaatctggaaagattttgtcatttactggcttctgagctagttcttgagatcatttggaagcactagcaaacttttctgtggtattaggggttaggctatttcctgtgaacacctctttaagatgctgatgaggagctagattgactttagttaaccatagagcctctacgggtggcaggagacattcttcctcgaagagggaaacctgggaggggctacgccatttacaagcaccaatatattaatagtgtttttttgtgattcactgtgccctaccaatctgagggtataggcgaaatcacagtactggccatagctcagaattttctgtctttgctccaactatttattgacgacctctgcaattagaaagatgcccatttgcacctgcccaggaatgttgcatgtattttcacaaataaatctcagactgctagcatcacaattggacctctggtccactagcttccctcatttcttgcttggcctcatgggttctgctatagttccaggcactgcctacattaatgcttacaggggtgctgagtattgtgctctgcatatctgcataggagagctgctggtagctcttgaagcatccttatctgacagatttatatgaaaactatccttcagtttctggcagagcctcattccactgggctgggtggagtgacagatactatttccatgtcatttctccatattattgccctgatacttacagcaataatgcttcctccttatttagccaaaggccaaacgttcctttgcaatcaactcatgcaggtgactagtcttgaacctcttccatcatttagtcaaacatgccatataccgtgaaactctgtgatacatacaactgaggacatgtggacatataaaatagtctgcatgaaaacaggtatatagtatatgttctaaattgtatatattaacaagctaaaaacaaatttctcaagtaaggccagatatttgaacattccagacagcctaatcaagtgggctgcagtcccttcaagtgatgtttgcagaatatttactcaacattcatttgggccaggtgcagtggcacttgcctgtaatcccagatatttgggaggctgaagtgggaggataatttgaacccaggagtttgagaccagcctgggcaacttagcaagaccttgtctctaaaacaaacaaaccacatttatttggatggcattggggaaagatggatgttacggctaatagcaactctcagctgtgatgttggggaaattatcttttgccttcaaattttcctcctgcattcaaacaagagtgtttaagttagctagacccaccctccctagaaggtactttagtaactttcagatattgcttcagattgctctttgaagatctcactccctgcccagggcagccgatggcagtagagcagaaacttgatttagcctgtgctttccattttttctttcaaacaaactgacttatgatcagggtccactgaaagcctatggccactctctagtatcccagcaggcttctgctcccagtagttgacttgtatgcttggccaaaagctgctcttgttcccacacctgtttgtgccagttgtacttattactatatgaatgtgaaaagcaaaagacaaagaaataattggtggtctaagaaaattaagttgaatgccttggcaaaacttaatacaatgaagtcatcagctgaaacacatcatttagctgtaatgagggctcagccccctgactcattgtacattccattcgacttgacctgaaaacttagcagttcttcctttgaggagacatcagggtttgatttcaagggaaacttacttgattactttctctttgtaaaagtaagagagagagttggacacaatagggtaactaacagagataaattaataggttatttaatttattatatacatttttatttaatatataattatatacctatgaataaaatatatatggggaaacttgtgaatgtggactgaagctgcagccaacttattttgtaacaattgttttgatcttgttctattggaaatcatggaggatgcatcacaggtgtagtaagtgtaagaactttggtcagtcaacctacactcaaagtgtacatacataaaaagatgtttaaaggaatgaacagttacatgttttaagataaaatactgtaaattatttaaggtgcttgtgtaatttgtcatgattccttgctttgattaactttttcaatgacctactggccaattctaattgagttggtaagagacatttgctcgatttctttctttctttcttttttggaggcagagtcttgctctgttgcccagggtagagtgcagtgatattggctcactgcaacctccaactcctgggttcaagtgattctcctgcctcagcctcccaagtagctgggactagaggcatgcaccaccacacccggctgattttttaatttttagtagagacagggtttcactatgttggccaggctggtctcgaactcctgacctcaagtgatccttccatgttggtttcccaaagtgttgggattataggtgtgagccaccgtgcctggactttctcccatttctttcaaccagggtgttttccctgtatgatccagtaattgccatttttctccatctggttacttttcctgtggtgttttggcctgtcttacaggattgtcacaatgctgagtgcacttaagtttgtaaaacattttcggtaaatattttaggtaagatgttaataagcatcttttggacaaaaagaattgcatggtcttacacctttgagaaatgatgggttatgccaaataaattatttttgtcattttatttttattgtcttacttttaggattctttcatgttataactactcccatttctttcaaccacggtgttctccctgtatgatccagtaattgccatttttctccatctggttacttttcctatggtgttttggcctgtcttacaggattgtcacaatgctgagtgcacttaagtttttaaaacatttccagtaaatattttaggtaagatgttaataagcatcctttggacaaaaagaattgcatggtcttacacctttgagaaatgatgggttaagccaaataaatattttttgtcattttatttttattgtcttacttttaggattctttcgtgttataacagagagaggaaagggaatgggggagaaaggtcacaaaaattagcatttcccaagcagtttgctgtggagcccccttttcaaggattgccatttatttatttgtttattttttattatactttaagttctagggtacatgtgcacagcgtgcaggtttgttacataggtacacatgtgccatgttggtttgttgcacccatcaacttgtcatttacattaggtgtttctcctaatgctatccctcccctagcccctgactccctgacaggccctggtgtgtgatgttccctgccctgtgtccatgtattctcgttgttcaactcccacctatgagtgagaacatgtggtgtttggttttctgtcctcgtgatagtttgctgagaatgatggcttccagcttcatccatgtccctgcaaaggatatggactcatccttttttatggctgcatagtattccatggtgtatacatgccacattttcttaatccagtctatcattgatggacatgtgagttggttccaagtctttgccattgtgaatagtgccacaataaacatatgtgtgcatgtgtctttatagtagcatgatttataatcctctgggtatatacccagtaatgggatggcggggtcaaatggtatttctagttctagatccttgaggaatcgccacactgtcttccacaatggttgaactaatttacactctcaccaacagtgtaaatgcgttcctatttctccgcatcctctccagcatctgttgtttcctgactttttaatgattgctattctaactggagtgagatggtatctcattgtggttttgatttgcatttctctgatgaccagtgatgataagcattttttcatatgtctgttggctgcataaatggcttcttttgagaagcgtctattcgtatcctttgaccactttttgatgggatttttttttcttgtaaatttgtttaagttctttgtagattctggatactagccctttgttagataggtagattgcaaagattttctcccattctgtaggttgcctgttcactctgatgatagtttttttgctgtgcagaagctctttggtttaattaaatcctgtttgtctattttggcttttgttgccattgctttcggtgttttagtcatgaagtctttgcccatgcctatgtcctgaatggtattgcctaggttttcttctagggtttttgtggtgttaggtcttacatttaaatctttaatccatcttgagttgatttttgtatatgatgtaaggaagggatccagtgtcagctttctacatatggcgagccagctttcccagcaccatttattaaatagggaatcctttccccattgcttgtttttgtcaggtttgtcaaagatcagacggtcgtagatgtgtggtgttatttctgaggcctccgttctgttccattggtgtatatatctgttttggtaccagtaccatgctgttttggttactgtagccttgtagtatagtttgaagtcaggtagcctgatgcctccagctttgttcttttggcttgggattgtcttggcattgtgggctcttttttggttccatatgaactttaaagtagttttttccaattctatgaagaaagtccgtggtagcttgatggggatagcattgaatctataaattaccttgggcaatatggccattttcatgatattgattcttcctacccatgagcatggaatgttcttccatttgtttgtgtcctcttttatttcgttgaacagtggtttgtagttctccttgaagaggtccttcacatcccttgtaagttggattcccaggtattttattctctttgtagcaattgtgaatgggagttcacttatgatttgactctctttttgtctgttaatggtgtataggaaagcttgtgatttttgcacattgattttatatcctgagactttgctgaagttgcttatcagcttaaggagattttgggctgagatggtggggttttctaaatatacaataatgtcatctgcaaacagagacaatttgacttccttttttcctaattgaataccctttatttctttcttctgcctgattgccctggccagaacttccaacactctgttgaataatagtggtgagagagggcatccttgtcttgtgccagttttcaaagggaatgcttccagtttttgcccattcaggatgatattggctgtgggtttgtcataaatagctcttattattttgagatacattccatcaatacctagtttactgagagtttttagcacgaattgctgctgaattttgtcgaaggccttttctgcatctattgagataatcatgtggttttcgtcgttggttctgtttatgtgatggattacgttcgttgatttgcatatgttgaaccagacttgcatcccaggaatgaagccgacttgattgtggtggataaactttttgatgggctgctggatttggtttgccagtattttattgaggatttctgcatcgatgttcctcatggatattggctgaaaattctctttattttgtggtgtctctaccagtctttggtatcaggatgacgctagcctcataagatgagttcgggaggattccctctttttctattgattgaaatagtttcagaaggaatggtcccagctcctctttgtacctctggtagaattcggctgtgtatccatctggtcctggactgtttttggttggtaagctattaattatggcctcaatttcagaacctgttcagaaattgaggtctattcagagattcaacttcttcctggtttagtcttgggagggtgtatgtgtccaggaatttatccatttcttctagatgttctagtttatttgcatagaggtgtttatagtattctctgatggtagtttgtatttctgtggtgatatcccctttatcgtttttattgcatccatttgattcttctctcttttcttctttattagtcttgctagtggtctatcaattttgttgatcttttcaaagaaccagctgctggattcattgatttttggaagggtttgttgggtctctatctccttgaggtctgctctgatcttagttatttcttgccttctgctagcttttgactttgtttgctcttgcttctctagttcttttaattgtgatgttagggtgttgatttgagatatttcctgctttctcttgtgggcatttagtgctataaatttacctctacacactgctttaaatgtgtcccagagattctggtatgttgtgtctttgttctcattggtttcaaaggacatctttatttttgccttcatttcgttatttacgcagtagtcatgcaggagcaggttgttccgtttccatgtagttgtgtggttttgagtgagtttattaatcctcagttctaatttgattgccctgtggtgtgagagacagtttgttgtgatttctgttcttttacatttgctgaggagtgttttactaacaattatgtggtcaattttagaataagtgcgatgtggtactgagaagaatgtatattctgttgatttggggtggagagttctgtagatgtttattaggtccacttggtccagagctgagttcaattcctggatatccttgttaaccttctgtctcattgatctgtctaatattgacagtggggtgttaaagtctcctattattattgtatgggagtctaagtctctttgtaggtatctaaggacttggtttatgaatctgggtgctcctgtgttgggtgcatatatgtttaggatagttagctcttcttggtgaattgatcactttgccattatgtagtggccttctttgtctcttttgatgtttgttggtttaaagtctgttttatcagagactaggattgcaacccctgctttttttgctttccatttgcttggtagatcttcctccatccctttattttgagcctatgtgcatctttgcacatgagatgggtctcctgaatacagcacaccgatgggtcttgactctttatccaatttgccagtctgtgtcttttaattggggctttagcccatttacatttaaggttaatattgttacgtttgaatttgatcctgtcattatgatgttaactggttattttgcccgttaattgatgcagtttcttcatagtgtcgatgctctttaccatttggcatgtttttccaatggctggtaccggttgttcctttctgtgtttagtgcttccttcaggagcctcttgtaaggcaggcctggtggtgacaaaatctctcagcgtttgcttgtctgtaaaggattttatttctccttcacttatgaagcttagtttggctggatatgagattctgggttgaaaattcttttctttaagaatgttgaatattggcccccactctcttctggcttgcagggtttctgccgagagattcactgttagtctgatgggcttccctttgtgggtaacccgacctttcttgctgggtgcccttaacatttttttccttcatttcaaccttagtgaatctgacaattatgtgtcttggggttgctcttctcagggagtatctttgtggtgttctctttatttcctgaatttgaatgttggcctgctttgctaggttagggaagttctcctggataatatcccaaagagtgttttccagcttggttccattctccccgtcactttttggtacaccaatcaaatgcagatttggtcttttcacatattcccatatttcttggaggttttgttcattgcttttcactcttttttctctaatcttgtcttctcactttatttcactaatttgatattcaatcactgagatcctttcttccacttgatcaaattggctactgaaacttgtgcatgcgtcacgaagttctcgtgccatggttttcagcttcatcaggtcatttacggtcttctctacactgtttattctagctagccattcatctaaccttttttcaaggtttttagctttcttgtgatgggttagaacatgctcctttagcttggagaagtttgttattaccgaccttctgaagctgacttctgtcaactcgtcaaactcattctctgtctagttttgttcccttgctggcgaggagctgcaatcctttggaggagaagaggtgttctgttttttggaattttcagcttttctgctctggtttctccccatctttgtgcttttatctacttttggtctttgatattggtaacctacagatggggttttgttgtggatgtccttttctttgatgttgatgctattcctttccgtttgttagttttccttcaaacagtcagatccctaagctgcaggtctgctggagtttgctggaagtccactccagaccctgtttgcctgggtatcaccagcggaggctgcagaacagcaaatattgctgcctgatccttcctctggaagcttcttcccagggggcacctgcctgtttgaggtgtctgtcggcccctactgggagatgtttcccagtcaggctacacaggggtcagggacccacttgaggaggcagtctgtccattcttggagctcgaacaccatgctgagagaaccactgctctcttcagagctgtcagacagggacatttaagtctgcagaaactgttcgctgccttttgttctactatgccctccccctagaggtggaattcatagaggcagtaggccttgctgagctgtggtgggctctgcccagtttgtgcttcctggcctctttgtttacactgtgagctactcaaggcccagcgatggcagacgcccctccccagtcaagctgcagtgttgcgggtcaatctcagactgttgtgctagcagtgagcaaggctccatgggcgtggcacccaccgagccaggcacaggagggtatctcctggtctgccagttgctaagactgtgggaaaagtgcagtatttggtcaggagtgtactgtttctccaggtacagtctgtcacggcttcccttggctaggaaagggaaatccctagacccctggtgtttcctgggtgaggcgacaccctgccctgcttcagctccccctccatgggctgcaaccactatccaaccggtcccaatgagatggaccaggtacctcagttggaaatgcagaaatcacccatcttttgcgtcaatctcgctgggagctgcagactggagctgttcctattcggccatcttggaatcacccctatttatttattttgaaggctaggtcttgctctgttacctgggccagggtgcagtggtgcaatcatagctcactgcaaccttgaactcctagcctcaagcaatcctcccacctcagcctcccgagtagctacaagtgcatgccaccatgcccagctaatttttaaatgttttgtagagataggggtcttgctgtgttgcccaggctggtcttgaactccaggctcaagcgatcctttcaccttggccttggaattgccttttaatatctcggaatatccgtgttactcaaatacagtttgggaaattctttgtgctggatttttaatgtctttaatctggttctcaattgcttgaagacagaaattgtgcattattcatcactgcagctccagggcatcccacagggcctgactcaagtactggctcagtagatgtgtgttaactaaatgagtgggcatacagtgagtgctgatttggctcttgccatgatagtacccatagttgggacccaggagccatatgccccatagttctgtcagcttgctgtagataatcatgccccatgagttaaaagccttgaagacagcacatgtggccagaattcagtgtgctcatcaaattggactttgaatgaagttgtgctgacccatttgtagctataatcatcatggcctttgggcttaaatgaagagcagtttacagaagcaacacgtgtatgcagccaaaccaaacatttgtgtggtcatctagcagaagcaaactcctggtagaaagattcatggcaccaccacgcctggctaattttttatgttttgtagagacagagtctcactatgttgcccaggctggtatcaaactactggactaaagtgatcttccccttcctaccttggcctcccaaagggctgggattatagacatgagccaccatgcacagctgagaaaattcattaaaagaaaatcttttcagtaatcttagctgtgcagaggcctcaagagttgcgtttaatatgacacaatccactgaggcacaacctcctgcaaaagcaaagggagcaccctctctcgctgtgattaggccgcaatgaaggaggcagggtgtctctgtgacatgagggaaagacagaataaagatggcaagtaattcctacaccaagggatggagcctgtatttgcttgccagggctgccataacaaagtgccacaaaccgagtggcctaaacatcagaaatgtatcaccttggccacgcatggtgcctcaggcctgtaattccagcactttgggaggctgaggcaggtggatcacctgaggtcaggagttcgaaaccagcctgaccaatgtggtgaaaccccatctctactaaaaataccaaaaattagctaggtatggtggtgcatgcctgtaatcccagctactcgggaggctgaagcagaagaatcacttgaacccagggggtggaagttgcagtgagcagagaccgtgtcattgcactctagcttgggcaacaagagggaaactccacctccaaaaaaaaagaaggtatcacttcacagcgctggagcctcgaagtctaagaagatctcaggggctggtttcttctcagttatatcaggaagaatctgttccctagcttttggtggtttcctggcaatctttggtgtttcttggagtgtagaggcattatctgatctgtcttcatcttcacagggtattctctctgtgttcatatacgtatccaaatttccccttttattaatataatgggtacggatcatattggattagggcccgcccttgtgacctcatcttaactagttacattcgtaacaaccctatttccaaggaaggtcacattcttaggtactgggacttaggacttcaacatctgaaatttgggggcacgagggcacaattcaaccgacaacaaaaccctactagggttctccagaaacaaccccaaggctgaaccaagaaaagacgcttttaattctgggggaagacagcaagccactctgcacatgcgcacaaaatgcaataaaaatctctcttttcatggaaggagaatcacaaagcagccagcacttgatcactggctttgctcacgctttcccacctcctcagacaggactctgagcctgcctatctaaagggtctccaggccagtggcagaggggattgctgccagggagggtctgggctggcccaggacggctatgggcaagcaggcctgtggcgatggtcataggctgtcctcggcccaggatgccatgtagccacatgatctccccatcctgagcagacataaggcggtagccacagcctgctccctggcatccttgtcagtgctgcttttcattcttcagccattccgaaggtgccacagcccattgagtttcctgcacctgtcaggagcttgttttgggtttaccacagcttctgagagaagtggagctacctagaatgtattgttacaaatgccagccttctacaccccggtcatagctcggcttgagttgcaaccaaagcttttttggggatgaaacagtctggatggagatcatctcctcctgctataaagggggaggtattagctcattttattgaattcaagttcacagatgaactgcaaatcccttttttcttctttctctcccaaagtagtttccagatgtcatatatacgtttgcactcacttgggtgcatgaatggttattgttagcaaattacttagatttgggcttgggggaaatgcaaaatggtaaaaaaaaaatggagtcctcagaattttaggtaatttctttccagcccagggagcagggaaatttaagcacgctattgtatacattttcagaaaggtgttgggggcttatgtgggggtgtaaatacaggacaagaatctcatttctccccaattagggcagggcaaaagtgtctctgatcagaatggtgctgcttaggaatggcgtagttgtaaaaccttgaatagaggtttagccagggagatatgaagacggaacactgttccacagtgagcaggtctatgcaaacctatcccaaagtctgaggaagttgagaggccaaagaaagagattgactaatccagtttcttagaaagaaacatttaatagggacttatgtacagaggccatgtctgtgactcaggtaactgcaagactagatggtgcatcacagtactactaaccctcagactcagggcttagataccataggtgaggggcatgtaggacaattgaagtccaccccccagggaaaggcaagaaggcactgtgaatcttcctaagggcaggatttatggtcaaagttgttttgacttaagggcaagatttattttaagtacatgctcttatacaagaaacaaaagataaaatagaaatcttagaggcattcctggaactcaggttaatcagaagtcagtatggctgattagcatcccaagatggagcttctttcactaccaaaaacatttaacaaaggaatggttgatttgcttccccaaggagtgggtcatccccagtagaaactgcgacattcttgctttgaggttggagaccccaggcccccttctactggctacatattctctggtgattgcatgttgggagcaaatgaaggtaatggtaaatggcttttatctactctcaacttcctcccagatgtaaaacacgtatgctaacaccgtcaatcttcacacactcaccactgcatggttaatgctcctgcagcttgactgtaccaggaaaaacacagactcaattcagaaggcctgagtttgagttctggcggtgccagtaactatatggctatataacctttgctaaataagactcttaagttgtctggactcatctctaaagtgtaaaatgacatctgtcacccaggatcatggtgagctgcaaatgaaattgctcatgttcaaatgaaatcatgtgtgtcaacataccctgtaggctccaaagcagctccacaaggatgaaagttgggactacgtctcacttttttttataacttagcatcgaattcacaattaatccaaaaataatagcaatgattaagcaaaatgtactacatccgtatgtattagccagggttctctagaggaacagaatttatatatatatataaaggggaatttattaagtattaactcacatgagcacaaggtcccacaataggccatctgcaggctgatgagcaaagagccagtccgagttctaaaactctaaaactgaagaacttggagtctgatgttcgagggcaggaagcatccagcatgggagaaagatgtaggctgggaggctaggtcagtccctcctttcatatttttctccctgcttatattctagccatgctggcagctgattagattgtgcccactcagattaagggtgggtctgcctttcccagctcactgactcaaatgttaatctcctttggcaacaccatcacagacacatctaggatcaatactttgcatccttcaatccaatcaagttgacagtattaattatcacaccatgcaataggatattattcagccataaaaaggaataagtcctgatacatgctacaacatgggtgaaccttgaagacactgggctaagtgaaagaagcccatcctaagagactatgtattatatggttccattgatatgaaatgtccagaataggtaaatcgatagacacaggaagtttatggctgggagaaacggagggattgggacatgttaggtattaggtatagggcttctttttataataatgcaaatgttctaaaattgtggcgatggtttcacaactctttgaacatactaaaagccatcaaattgtgtatttaaaatgagtgagtcttatggtttgtgaattatatcttaataaagctgttaacaacaacaaaagcagcaattgaaattactaaaggtttttttttgtttgtttttgttttgtttttgttttttacagagtctcactctgttgcccaggctggagtgcaatggcatgatctcagctcactgcaacctccaccttccaggttcaagtgattctcctgcttcagcctctcgagtagctgggactacaggcacaggccaccacgcctggctaatttttgtatttttagcaaagacgggggttcaccccattggtaggctggtctcgaactcctgacctcaggtgatccgcccacctcggcctcccaaagtgctgggattacaggcgtgagccaccgtgcccggccactaaagggttcttaacatgaaaatgtatctttcttttttaaactcattaaaaatatttaggttcctctattgacaataatagtaactaactttaacaagcactcatgaagtgccaggtactgagctaagcatgttatacgcattctctcttttatccttacaacacaggtttttgtccctgttttagagatatgtagcagaaactcagaggggttaagcaagttgccctggatcacacaactagtaagttgccaagctggcatttgaaaccaggcagatggactccacagcctccatcctattacccaggtctgcctgtgtcttcattgagagccactgttgaaacatctttaccttctaaatgtgggctagttaggcctgcctttgtcttcattgacagcctccattgaaatatctttaccttcttagtactgggctgtattctgtcccatgagctttcaactgagtttaaatggatacggataattctgcttaaatatttaccgtgtgatttaccattagggaataaaagcagaatctatattttctggggactaattattatagaaaggtataaacttggtcccagaaactccatctgactttactactgcccagcatatgttttgatctggagatgatgccaggaaggtgtgagtttctcagtccttttttttctctacccaccttgctagaaagccagagcttctgaccacttaaagcctctgtatttacctctttttagagagaaaggaaggcaggctaggttgattcttcctggggaatcatttaatatttttgtaagatatttggggctcacatgttttgtgatagaattcaccatgaatacaaaagccacaactgatctgaggctcctcaacgtgctagagattgctttccccttcgacgcagggtcggatgctgtcttccagccttatggcaggcctcgccaccagaatagattaattttgtcattaccctttctcaatttctgcctttgaccagaaaaaagaggttaattgtgtgccatttctcaggagaatgaggtatcagaattttaattcctgatattttatgaattgtgggcagctaattaaaacttaaagattagaggaactattttggctaagagaccatttgcaggattgtgaaataaagagaacaaagggttgtcttttccttttattcctgcagcttaaatggaacttcatgctgaaatagagccttgaattgttttgcatactgagtactcattgtattgactctaattttaattttgcagcaagtggtataatatctgaaagctattgaggagctaacattgagattattgagaatgttaaatagcaagatttgtgttttgaggctctgtttgacccttcttgacctcagagagacatcttagagtcagatagggaccacttaaagattctattagatgtccttaattgccaccttagaactcaatatgtatttagaccttctcctcagttctccctcatagttaactgtttgaatagaataatggacatgtctcaagcctggggctttttcttggttctactactacctgtctgaattttaggctattgcatttctttaagcaccaccaaaatcacccaggacccacatgtttgggatgtgaatcaaggcaaccactggcctctaccataccttttctcaagatagaaaaaggacatcttcagcagatgcagtccctaccaatgtgtagctgggaaagctgagcatggttggattgaagctcctaacccacctcctgacaatgtttccttgtgcagtgcaaaccccatataactttacagtggccatgctgaaataaccccttttaaattgcttaggtactcatctcaatatgcttcttgatatacagtcatttcttttttctgagatggggttagatgacatgagatttgaacaagtatccaaatgcaaactccttgggtacaaaaccaggttttgctcatcttttataactcccaagctcctaagttttccattccatccaaaattgaataagcactcgcttacctactagggcccaagcactgttctaggtgctggagagtcaccaggaatgagatggataaggctccagaccttataaaaattataacctaggaaagtgagatacattaaatgaatcaaataactacccaagtagttcacaatttcacttgggtatgtgccgtgaaggtaaagtatagggggctttagcaggatatcattagcagatgtgacctaggcagggaggtggtagagatttccatgagaagatgacatttgtgctggaacttaaaggaggaataagaaataaccaggttaggcggagggggcaatggtgggtggggcaaggaagaaagaacaatccattcaaatagaagagtgtaggcaaaggtcttggggctggaaagaacttggtgcattctaagaattgagataaggccagcaagactgcaacttaaagggattaagaagaagcacaaatcaaaatgaggccgaagagagaagaggccaaatcatgaagcagagctggagtccatgctaaggatttgggacattattctatgaagaactggaatatattcagatattcagttttaagcagagagccaaaatgattaaacttgtattttaaacaataactctggtcataacaaatgaaccaacaggaggaaagcaagaatggatgcagagacgtgtgcagaggctattgtcccaggtcagacaattgatgacagtgaattgaatattacattggtaaaaagtggagaaatgtgaccaggtttgagaaactttgaggcactaaaatcaacagaatttgatgatggattcatcaaggggatgagagaagaaaaacgtcaaggattctgacatgaataactggacagtattagggccagtattttctgagctgtggaacatgtagatgtaagtttggagagtgagatcatgagaaaagttttggatacattggatttaaagtgcctctgtgacttccatgttgagttgacagtgatatacatatagtctagaacatggctgagggtaagcagtgtggagggttcaactgaggttcccagatatcaattttgggtggtatcaatctgcctggttgtataattgtttttttttaacaacacttagttgccagttgctgacacaaagatggccaatggttggactttctttctttcttccttccttccttcattccttccttccttccttccttccttccttccttccttccttccttcccttcgtttcccttctccttccttccttccttcttttcttttcttttctttattgcccagactggtcttgaactcctggactcaagtgatcgtcccacctcagctgctcaaagtgctgggattagaggtgtgagccactgtgcctggccctgaaatcatcttcaatggggtgaaatcagtggggaccatgctttcctttgaggctgtagtggggagaattcattccttgcctcttccaacttctggtggctaccagcattctttaaaaaatttttaaatttaattaattagtcaacgtattttgctactagcatgctttggcttgtggttgcatcattccgatctttgcctctgccttcacattgacttcctgtcttctgtccgtgttaaatctctctctgtatatctcatataaggacacttgtgatttgatctagggcccactgggataatccaaggatactctccccatctcaagatccagaatttaattgaatattcaaagtctttgccatacaaggcaacatttacaggacttaggacttgctgtctttgggtgtcattattcagcctgttacagaatgcttgatcaagggaagtggaaggatgtgagggtgtggtcacagaggtggatatttacatgttataaattttagaagtctcatttttgaaaatgacacagtttcaggtgatgagagtcaagaatgagatcatgagggtggtatctgaggtagagaaaaagaggaattcactagagatgaagtcaagaagatgagggtccaggatattgggtgagtgtcaacatggaccttgaagcctcattggaaaatggcaaaaattgttgaggttaattgtcagtctttggatagtgagtaaaagtgattagatgttaggagacagaaatgaaacgatgttgttgggtggaataaaaagggtggaagagaaattgttagaaaatcatttccaacctatataattctcctcaatcccttacttcgcttaccctcttatatttaggaaatgaccatatttggggggaaattttagaaactacataattagtatgccttgaggtgcattatttgcaataatgtatctttgtacaaacttgtttcttagaacacgcttttgaaattggttttgactttccttgaataatcttgtaaattacttggttaggaaatgtggttgtgtctcagtctattttctgttgcttataacagaatacctgaaactgggtaatttataaagaaaaggaatttattttttacagttatgggggctgagaagtccaaggttgagaggctacatttggtgaggaccttcttggtggtgggaactcactgcagaggcccaaggtggcacagggcatcacatggtgagggggggtggactcaagtatctgttcctcttctaataaagccaccagtctcattcccatgataacccatgaatccattcattcataaatgaattaatccattcatgaaggcagagctcttatgacctgacaacctcttaaagaccctccctttcagtaatgtcacattggggattaaatttcaacgtgagttttggatgggacaaatatccaaaccatagcaggttgtctcctaatgatttattctcttaaaaagttttttcccccattgcaaatgagacaaaccgtgaaatctttagcacaaagaaaaattgttgatttcacttagcttgaaccatgtgactttcaccagatgtatttcttttctgggcagcagttatagcaaggattgaaatttaatgtagaaaatagcctacctgatttgtatctttcctcctcaagccttaattcttccagaagttttcctccctacccacctgcacttggccatcatcttttcctacttggagaaaattcaggcttacaatatctgccaggcacactcaatccatatgccacctcttccatatacagctccggtcatgcgctagagaacatgaggctgagggcttgcactgggatcagctgagtctggctcctcaccataagaggtgaggagctcctaaagttagacggtgggtgggggtgggggcggggcttgagttgctgcttatctttgtcttatttggactcctgtggatactgtcctgttctttctcacttttctgcatatgttctctctgggtgattccatttttaagccccatggctttcaaatctgtccttctagttcagagctcttccttgttatctggatgtgtgtatcaaacaccttccttggagatcacgtcgcctaccccaactcaactttccattctctagctgaactcccaggtgagtatttgttacagtgctgtaggcagtgtagacagctgcagtggcttcttggagatgacctgcattgctactgtaagctgaggtccaagctttctagaagttcttgagattcaaagaagcttctctttttctgaacagcagctgtagcacttctgaaaaccactccaagcccttcttgaggttttgtaagcctctacttccttgtatcagaacccatgatgcttggaatacacatagcagcttggcactgacaagtactgattcagtatttggtaagtggcattaccagctactcagttagctaagccttaaccatggtgtttactttacttctcctgttcctcaccttccgcatccaattggtttccaaattctgtgtattcttttgtacgtctgtgttgcagtttgaatctatcccatcctcttcattcccactgttgccaatttggtttagaaccttgtttatttagtacttgggttattgcagcagtttctggactaattttactgccttctgtatcccccttgaactcttgtcttagtcagttggggctgctacagcagagtaccatagactaggaggcttataaacaacagacatttatttcttacagttttggaggctggaagtccaagatcaagacaccaacatcgttgggttctgcccagggtcctcttcctggttcatagactgccatcttcttgttgtgttctcacatggtagagagagggctagagatttttctgcagtctcttttctaagggcactaatcctattcctgagagctctaccctcatgacctaattatctcacaaaggcctcacctcctaataccatcacattggggtttagagttttcagcatatgcatttgggcaagaagtagggggtacaaacattcagtccgaacaaacctagttaactttttccatcctgtcatcagagtagtctttgtaaaatacagctgtaattatgctacatctgccgagctcctcactgtctgcagtctaatttgcaggttcctttgcctgccatgcgaggctaggtctccacgtccatcttttgtcttcccccttcccgccttgccctgcagccatattgagggaaccgaaaggcccagcctttctcacatccctgcctttcttcctgctggtccctttgcccacgtgctccccactctgcctggttaactcctgtttagcttttgcatgtaagtgcagcctcttctgacactgccctggagtctgggccacacgtcttaccctgtgctgcagcagcctctgaacactcagaaccttccagtgactcagcccagccaaggctgctcactttgcttactagctgctaactttgcttactcctctcagactctgcaatggtcagtatagcctttcagggcaggaagggaaacaagaggaaggggttcagacaggctgcatgaagtcaaatgtagtgaaccccattgatgcccacccccgttttggtggtttggccacctcccctttctctgtgaggaaattcatattttgccacctccccttccttggactgttgttacgacatcacatctgtgctctttccgtatttcattaggatggaagtggtgatgttcccggcacagtaggcagctaggtcttagagctaagtgtcgatggcttttgctttccatctctggaaagcccaagtgcccagcccatgatcctagtctcagggttctggttgccccgtcgccaatccctgaccttttacatctaaatcaagaaaagagataggtatctatcttttttttttttttttttttttttgagacagagttttgctcttgttgcccagactggagtgcaatggcacgatcttggcttactgcaacctctgcctcctgggtttaagtgattctcttgcctcagcctccctcaatagctgagaatacaggcgcctgccaccatgcctggctaatttttgtattttagcagagacgagatttcaccatgttggtcaggctagtctcgaacttctgatctcaagtgatccacccaccttggcctcccaaagtgctgagattacaggcgtgacccaccgtgcccagcggtatctatctttatctaaaggccatctcccagcctaactctctgggaactgagtagagtctttacagcctgcctagccctagtgtgtggacctctggctgcttcctgcttgttttgtctccctgtcacagaacattccccaccaaatctcagaggcatagtaagtgcctaacaaatgctgcccattgtttcatatattgtttctgaaaattagataattggaggttggttgttatataaattgcttggtgtgctaaaatttactctaagctcaggattattccacagacaccgataaaactgtagcagaccatagttacctctccacacgataaattcttgtgctctacaaagcactttgagtggagagagtaatttatatgcccaggtggaaccagtacacaaatctgctaaccaactgtagactggaatgcaatctggaaagcagcctgttagcatctcaaaggagataaaaaaggatacttccttatttttatctctgacagagctgtcgccttgggaatgactagcacacatcagagaggcaccttctttcacccagcatcacaagtgacacaaaagcacagacgtgaatcaggagaaatgaagaaaccagccctttgtgtctttaaatacatgggtaagactttgacttaacagaatggcacgttctctgaaaaagttcatggcctcacccaaacttttgctcatgctatttctgctgcctggaaagcccttctttctaccttctgtatattcagcctcccacagcttcctcttcaaatcttgttacctgcatgaaggctcctctggctacaatgatccacactaatctcttcctactctgaagttctcatgggtctggatacttagtttggctttgttgttttaaatctttcatgtgtttctcttctagctcctgtgtattttcacataaatacacatggggtgtgtgtgtgtgtatgtatatatgtgtgtgtgtgtatatatatatatatgaaaccattggcatgttgtattataaatattacatagatttgttgaattgatgaactaacagggattattgaagattgaatagaaacattccatactgagtcaatgttttggtgaacaaagccatgccatactacatgtgtttcactaaatagtttgtcgttttttcccacttctggcttctcaactgtccataataattataattcctattgacatatttttatttttaaatggcaagaacaactcttcctttaataaattagaagttatttgaatgtctttctttgggtggtagttttgcctgaaagaattgtgcactatttttgttacttgatgatatttccaatttctttagattagagaatctgcttcttagtgtgtcttgtggtgtttagcacagtcctaggccacgctcaaattttattatctcaatatacttctataaagttattattaaaagaggcaatccatgtgaagcagagagcagtttctgacatgtagtaactgctcaatccctgctgctattattaacattgttattatcgttgctgttgttattattatgctgtatccagtactgggtgaggcactagggatacaaaggcaagtcaggaatggctacttcctttaaaagccttatggtctagtgggagtagacaaagtaaaagggcaataaaaaaccaggtgtggtatcatgcacttgtggtcccagctactcaggaggtggaggtggaagtattgcttgagccccagagttggaggctgcagtgagctatgattgcaccattgctctccagcctgagcgacagagcaagacccccatctcttaaaacacaaacacacacacacacacacacacacacacacacacacacacacactgacaatgctgggcattgaggtgtatagtgggaggagacaacacacctatggtatgagaacatggagtggggtgagaaagagtttctcctttagcctgagagaaggggtggctggggaagttttcatggagagcaagctgggagtcctgaatgatgaaagttatgaggccggatgcggtggctcacgcctgtaatcctagcactttgggagggcaaggcaagtggatcacttgaggtcaggagtttgagaccagcctggccaacatggtgaaaccccatctctacaaaaaatacacaaattagccaggtgtggtggcacacacctgtagtcccagctacttgggaggctgaggcacaagaatcacttggacccaggaggtggaggttgcagtaagccaagatcatgccactgcactgcagcctgggtgacagagtgagactccatctcaaaaaaaaaaaaaaagagagagagagagaaagttatgtaggtgcaggggaacacgaacagccttccaggaagagagcagtttgtgcaaagatccagggtcctgagagagcagggtgtattggaggaatcagcagttcaatgtagctggaggggcagggcagtccccatttctcaggtgggaatggcggagagacagataagcaccttatcaagaaaggcctgatagacattgttaggactttgggttttatcctcaagtccactgatgccatgaaagcatttttaaacagaggagatttgcattttgaaatgatccatctcttgctaggtgtctacaataaattagatggaagatagaccactgaaagccagtgaggacagaaacagtggggatgaagagcaatgcagagttttgagaaatatttaggaagtagaatgtgcaggaggtggttcacatggttgggggaagatgtggagaagtggaaggaattgcaggcttttgtctagtggacaagtagatgttgatgctccacaggcagcaccaggagaggaagagccaattttgtggaagatgtgtgtttgggttggatgcgtgagcttggagctcaaaaagaagtaggtgctggagaagcctatttgtggatcataatgtacagtggtaaaagccatgagaaagatggcaccactcagcaggagtgtctaaagcagctctgtctgctagaaatataacataagccacatatataatttaaaatttcctgataaccacatcagaaagtaaaaagaaacaggtaaaattaatttgaataatatatttaacccactacatccaaagtatcattgtttcaacatgtgctcagtatgaaaattaagaatgagtcacttcacatgcttttcttcatactagtcttttaaaccttgtatgtattttacactgacagcacacctcagtttggactcaccacaatgcaagtgcttaattgtcttatgtggtcactgtggtggacagttcaggtgcagggcattaactctccactttggctacacaggatgatcacttggtggtaggagggtggtttaaatatcccgatacccatgatgcaccctagtccaattatatcaggaaacctgcaggtgggacctgggccttaggactttgtagagccatccagtgactctgatgtgaagagggccaaagacataactctagagaatgcccttgatagttagggagtagaaagagaaactggaaaagagattgaggagaggacagagatctaggaggaaaccagccaggaggaatatcttagaaaacaaagggggagtttcaaggaggatgctgccaatgagtaagattacaactgaatatcattcatcagattagcaatagtgtggtaggtgtcattgatgctccttgtcaagaatgacttaatttgattcttcaacaaattgctattgagtgcctggccaatagcaacaaattgctattgagtgctgggcacatgattcctgacccagtggagcttatggtatagtgatcatagtagataacatttttgagcacttacttataagccaggcactgtgttaagactttgtatgtattaactctctcacttgattctcacagcacttctagaagatgggtgctattatgattccattttatgtataataagtctgagatttagcagtgtcaagtaactggcccagagcccatgtatcagtcagggtaggctaagttatgctgagataacactcctaaaatctaagtagcttaagacaaggatttatttctcactcacactgcatatccattatggttggcaaggggctgtgctccacattgtccccactttagggccaggctgaaaatcacacactggctttacttcttttattttactggccagaatgtgtcacatggtcacactcctctgtgtgtgtgtggggagggggtgatggtgtggggggagatgtcagtacttcccaggagaaaagatatggaaatatttgagagaacagcaccaatgactgccacagccaggagatggggacccaggatttatacccaggcaggctctccacagctgacatcctacccaccatactgcatggcctcccacttacagaaaaaggagaaaagttcacaaagttaagagtcttccaaattttagatctcatagttttctctcagctctgaaagactgacagcaatgcactggttgtctgattcagcctcttatttccaaatacccattcagtttgcttctctcaactcaacataataggtagcccagagctaagacaccatggaggagggagttggaaactgacctctctcagtagggtctgattcagtggcttggaaactgacctctctcagtagtgtctgattcagtggcaaagcaaaggctcagaattcctcacagagcatcctgactagaagagactttcaaagtcgtttaatttaagtaccaatcccctgtttttattcttcttctctgagagttggtcatccaccctcctctgtagcactcatgggaccaagagctcagaaagttctgaggcagcatctcctgtaattggactatctggttagaaagtgtttctttataatgagctaaaatgtgtctgtgtaaacttccacccagtggccccctattcttctttctcaggccacacacaacaattcgaatccccctttcccagaacagcccttcacatttaaaaaactgtctttcatattcctcctgagtctttctcctccaattggaaacttctctaatttgaaacacatcaaactgaaagtttcatttttatgacaaggttgagactcttcagacaatttgagatttcttttccttctttctttctttcctctcttcctctttccctccatgcctactcccctttccccagtgctaacagagtaaactgattgaaaagacataaatagaagggaattgatcaaatagtgcctgttgctgtgacaactcagtcactgctccagcacagacctttcttggggtccagtataacccacctagctctttctctgatgccagatattactagcgaatatgtgtttgcagactcatctgtgcctaactcatagtgttattgaaggaataaaataaataatctataaagtggtctgctcagtgcttcatatgtagtaggaatcaaatgttagttattatgacaaacaattagggcaatgatagacagtttctaccaccaacgtaatacataataattactagttatcactttttactaacagcatcatgaaatgtagcatgctatgatctttgcagataactgaggtttgcctatgtatgccatagtaaacaatgtaaacttataaaaatgtgactaaagagcagtatataaggccctttcatgtgcacatttttatctttgctaaagatttggatgagcaatttcttctatcatgaatgaagtgaaggatagagactaaaacatgtagactcttgactctataaagttagaagtgattaattaaaactgagctaatatcttctaagagtttagataaaaaatagtcaatatacggcggggcgcggtggctcacgcctataatcccagcactttgggaggccgaggcaggtggatcacgaggtcaggagatcgagaccatcctggctaacacgttgaaatcccatctctactaaaaataccaaaaattagccgggcatggtggtgggcgcttatagtcccagctacttgggaggctgaggcaggagaatggcgtgaacccaggaggcagagcttgcagtgagccaagaccatgccactgcattccagcctgggcaacagagaaagacactgtctcaaaaaaaaaaaaaaagtcaatataccagaaatgcaaactccaactgttgttcaaaagcaagctgttctttgatagcccacatcaaaggtgttgcacctgttcgcttgtggtgtgagattgaaaggctaccagaatatcctcttagaataccagatgttttttattatcaaactttttattttgaaataactttagacttgtagaaaagttccaaaaaagagtagcgagactttctctttactttttacccccagcttttccttatgtcaatactttacataaccctagtataattatcaaaggtaggaaattagcattgatacaatgatatttactcattcggagatcttatttgagttttgccagttttccttctaatgtcccttttctgattaagcatggcatgccatgtagttgtgtctccatattctccttggtctgtgcagttcttagtctttgtcttttatgacttgaacacttttgaagaatactagccagtccaacatccttattttccagataaagaaaccaagactcaaagagctcaatagagtaagataatagtaaaaactctcaatgtgcatcagcctgatttttaaaataaatattaatagattgaagctaaacatttttggcaagaacactgccaaagtgatgctgtgccctttttagtgaataacaggatgtacatgatattgatatatcttatcatggtgatgctaaatttgatcactagtttaaggcggtatcctacagatttccccactttttaaaaattatttttctctttataagcaataaatatcttataagaagatattttgagactatgtaaatacactcttttgtcatgcaacagtgtaatccataatgattactgtggaatttgtctaatagttactttctatttgcatcattctttctatatttactaattaaattctgctgtcccttctcacacattaatttttttatgtgtttatttatataagtatgaactcataattatttattttattctatgggttataatctattacaatcattatttaaattcttgttcacattgtttcagattttaccactgggggctcttcaagttgctttctgtatccttttgacttgcctcatcattttagggaggactccttactttcttgcatcaaaaaatgtttcaggctctgcttttgcctttttctgccccaaccctggaatcaactttccccaagagcctaggttgttttaatggagaatggtatttagaaacgaagagctggggctagatgaccagatggagttttaagcgattaagtaaacaccagggggagaaacaaaagatagtcactggtgtttagatatccatggtggcagataacaaactatacgtgatttctgaatatcaagtatattagttatatattgctgtgtaacaaattacccccaaatttagcagcttaaaatacatgtattatctcacagtttctgtggatcaggaatccaggcagggctgagctggttctcaactccagcatttctaacaagcttcagtcaagtcagctgggctgtagtaatcttaaggctcagctggagataattcacttccaagctcacatggatgtttccaagatttggttccttgtggattgctggactgagggccttagttccttgctggctgttggttgaagactgctctcaatttcttgccacgtgggtctcttcaacaaggcagcttgctttatcaaattgttcaagctgagaagacaatagtgttggctagcaagatggaaaccaaagttttttatacaaactcacaaagtgatgtcccatcatgtttgccattttctcttctccccacttttgtgccatactcactctctttcaactctgattatgtagaatggctgttggtatcctcccggtcttcctccatggccgaaaaggaaaatatgctcccatggaaaccaggataacagatgaccagatggcttacattctcaagctaggtacatttgtttttctaaaatgtagcttctacaaacggactttcggccaaatctagactctgacattaaataagataatgactgatgttagaggattagtagaaaatctagaaatagcctgcacttggcagtaggactatggtgtctaatctggaggtaatattatctttgtctaacaaagaagtagaatttttgaagctgaaagagaccttagaataatgcagaccaagccctaattccccttattttccagatgaaaaatctaagacctagtaagataatgataaaatgcgtgtgtcaagaaccctagaccaggataccagatctagtgtgctttccccaagaccaaaccagggccttcaggataacaaagagtatttctgtgacaaaagagacaatttgttcttataaacattttctaaacttttttggtgtaccaggcttttgttcgtttttcagtcatcaagcctaactgagcatccactctgttgctgaaatgctgctggggatacaaagacaaatgaagtgccgtctccgttctgatgtgacaaagagactagaggaagatgaacatgtgaacacacacagtccaatgagaagaggtaggagggagttatgcagaaggtgccttggatacaaagaaaataagccaatacaagtcatttcttatttttcacacacctaataataaatggcatcaccttgacaagtcacaaatgttgtattggaaatccttagcaatatttttcagagggttgcttatgggcattttgggtgggacaactctgccacctgcccattgaatgccagtagcaagtatccccccagatcaaaaacaaatgctggccaggtgcagtggctcacccctgtaatcccagcactttgaaaggccaaagtgggtggatcacctgagatcaggagttcgagaccagcctggccaacaagatgaaaccccatctctactaaaaatacaaaaaattagccgggcattgtggcaggcacctgtaatcccagctactcaggaggctgaggcaggagaatcactggaacctgggaggtggaggttgcagtgagctgagattgtgccactgcactccagcctgggcaacaagagcgaaactccatctcaaagaaaaaacaaaacaaacaaacaacaaaaaaactacaaatgccccagcaccaccaaagttgtgcactgcatcagttgataagctctaccaaggctaacaggtaacaagaatctacctgcagtacacagaagcagaatgctgctttgcaaacatattgaagcattgaaaattagtgtaaatttggaacagatgattttagctgaagattaattacattagccaaacacaagaatcacagtctataaaaataacaaggattgcaccacttttcagcagcatcttattaattccaagtcttgcaaatttggctttggattaagatgtactaatgtttatttttgccttcactttgataaatgagttcaccaagcaacaacataaacaaaacagaaagaaaatgtttacttcacttatgcacaaccaacaccattcattttacaggtataaagcaaacagtagttcatcaataactctaatagttatgaaagccaggacccccacttgaaaattgtatgagcaatttttaaaaagagaataatgggtatgtacctgtattagttttctagggctgctgtcacaaattaccataaattgagtggcttaaaacagcagtaatttattctctcaccgttgtggaggccagaagtctgaaatcaaggtataggcagggccatgctatccccagaggttctagggtagaacccatcctgtcttccagcttctggtggctccaggaagtctttggcttgtgacagtatcactgcaatctctgcctttgtcttcacatggctttcttccttgtgtctctccagttttctgaggcctttgtcttatgaggacaccagtcagattttgtgcccaccctaaatccaggactgtatcattttaagatccttaactttcccctcccctcctcttccctcccctcctctcctctccttttctttctttctttctttcccccacctcccctcccctctcctctccttcccttccctcctttttttgaaatggggtctctgtcaccctagctgcagtgcagtggcgtgatcttggctcactgcagcctcgacctcccaggctcaggcaatcctcctacctcagcttcctgagtagctgggactacaggcatgcaccaccatgcccagctaattttttgtatttttagtagagatggggtttttgctatgtttcccaggctggcgttgaactcctggactcaagcaatccatgcccccttggcctcccaaagtgctgggattataggcatgagccaccgcacccaacctaactgtattttcaaagactttatttccaaataaagtgacattcacaggtcccagggcttaggtctcgagcacatcattttggcagacattatttaaaccaccacggtgtttctaacaatattttataacccacctctttactagttaaaccaggttttccttgcaatgagcctgacttgggaagcctcactgagtcacagaaaggtggggacctggggtggcaggctcacagtggctggaagtcagaggatttgtctgcatgagcagatgtggtctggagatacagatttcggagagagtgcagcgaggagaggaaaggacagccacacgttgaagggctagtagacgagaaagatttataaagatgactgaggaaaatgaagaaaaaaaggaggacacaaggagaatgaggtacctagaagctgagggaaaggggtgaaccaagaaaggagaggagggggtcagaaagctacaaagaggccaagcaagcgaaggactggccagatgcctgctgggtgtaatcacaagttcaccagctcctcgcagctgagtgttgagggctgatgactgaacgcaggtgcaatagttaaggattaaatggaaaaagagcaggtggaggctgggagctcaggccactctcccaaagagtctggcagggaaagtaagccgagaactatggcaatacctgctggaggaaggtccgtgtccttccccaccacagaatcaactggaaatggcagaggcaacagaagaacatgatggtgagagaaaggggcaaaattcatgggatgagggggacagcagggagggctatggaacagtgaaggcaccctcagcagagcctcagaagtgggggctggggctatggaacagtgaaggcaccctcagcagagcctcagaagtaggggctggggctatggaacagtgaaggcaccctcagcagagcctcagaagtgggggctggggctatggaacagtgaaggcaccctcagcagagcctcagaagtaggggctggggctatggaacagtgaaggcaccctcagcagagcctcagaagtgggggctggggctatggaacagtgaaggcaccctcagcagagcctcagaagtaggggctgaggctatggaaacagtgggagacccagcaagggcagagtgagggagacaataatacctacaagatagcgaactttgggctgccttcagcttccttaagctgaaacatgaggactttcctgacatggtctctgctcaatctgcagccttgtccctcatgaactcttcccttcttgcacctagtgcgccacattgtgatgatttggcttttgtaatgctgtgccctctgcttgggacaccctccctcactctcgcaggtttggtggtcttgccaggagtttctgcaagcctgttctcattctctctctctcctctctctcctttctctctctctctctctctgtctctgtctttgtctctgcataagtaccgtgactgcaagatccatggctgtcttcttccccatccttgtgagcctggtgcctagtgcagggccaggcatacagtaggtgcttaataaacatttgttcaaggaataagtcaaaaaggaaggaaagtagaaaggaggaacagatggtgactagaaaggacaacttactttttatgtactagaggcactaacttctttaatttttccgacagcctgatcagagagaggtattatgaacaccatccactttttataaacaatgaaaataaatgctcagagagatgaacatttccaaattcttttatttatttttaattaattaatttatttatttatttgagacggagtcttgctctgtcacccaggctggagtgcagtggtgcgatctccgttcactgcaagctccgcctcccgggttcacgccattctcctgcctcagcctcctgagtagctgggactgcaggtgcccgccaccacgcccagctaatttttttttgtatttttagtagagatggggtttcaccatgttagccaggatggtctctatctgctgacctcgtgatctgcccgcctcagcctcccaaagtgccaaattcttttaaaatctataaaagaacaattatttagaaaaaaaagaaactaaaaatcactgtgtgaggatggcagtggtagaaaagtctggaaggatcgtcaccaaatgttaatggggttgtcacagagtggtgcattgtgctattctgcttttgttccgtttgcctatctgaatgattttttaaaatgaaaatatatttacaaagtgaagagcaatgtttactgcagcattattctaatagccaagaaaaggaaacaagctaagtgtccataaacggttgaatggacaaagaaaatgtggtacacaatgggatattattcatccttaaaagcaaggagattctgtcatttgcaacaggatggatgactctggatgacattatgctaagtgagataagccaggcatagacagacaaaatctgcatgatctcacttatatatgggttctaaaaacatcaaactcttagaagcagagagcagaatggtagtgatatggtttggttgtatccccacccaaatctcattttgaattatagctcccataattcccacatgttgtgggagggaccaggtgggagataattgaatcatgggagtggtttctcccatactgttttcatggtagtgaataagtctcacgagatttgatgattttctaaggggctccccctgttgttggctctcattttctctcttgcctgctgccatgattgtgaggcctccccagccacgtggaactgtgagtccattaaacctctttttctttataaattacccagtctcggctatgtctttgttggcagcatgagaacagactaatacaggttgttgtcagggatgggaagtgagggaaatggggagatgttgatgaaagggtaaaagcttcagatgtgtaggatgaataagctctggagatctagtgtatagcccggtgactatacttaactatactctattgtatacttgaaatttgcccaaagaatagatcttaattgttctctcacacacaaaaaaggtaactatatgttatggatatgttaattagcttgattatcatttcacaacatataggtatattaaaacttcctattgtatgccttaaatatatacaatatttgtttgtcagttataacctcaataaagctgaggagaagagggaaggccagctgtgctttcggttagagcatggtgggggttcagccctctcctatggagagagtgaagggctggaacacagggttggccagagtcatgaggggaggtcagtttaatattctccatggcttggacttgaggctagctctgggagtcaaatcattcctaacttattgattccagtgtaaaactgaaatggtgtctaggccaccgatggtgcactttgcttatttgttcattaagaactagaggtgttttgtatgtttaaaattaggccatctaattcatgctgccaggtttgcttttgaacatcctgaagagaaaattattcttttatactgccatcaacagccactgcttggtgctttggagagaacgcacacacacacacacactcactctcatgcacactcctttggtccttttattgctttgggaatgggagcatatatctttatgcttttagtcttctttatgctaaatatttatgccaagttttaatcaggaagctaaatgtgtgtctggaattggttccttctggtgggttcttggtctcactgccttcaaaaatgaagccgcagaccttcacggtgagtgttacagctcttaaagatggtgtgtctggagtttcttccttctggtgggtttgtggtctcgctgacttcaagaatgaagctgcagacctctgcagccagtgttacagctcttacaggtggtttggacccaaagagtgagcaacagcaagatttattgtgaaaagcgaaagaacaaagcttccacagtgtggaaggggacccgaatggggtgccactgctggctggggtggccagcttttattcccttatttggccccacccacttcctgctgattggtccattttacagagtgctgattggtccattttacagagtgctgactggcgcatttacaatcctttagctggacacagagcaatgattggtgtgtttttacagagtgctgactggtgcatttacaatcctttagctagacatagagcaatgattggtgtgtttttacagagtgctgattgatacatttacaatcctttagctagacacagagcactgattggtgcatttacaatcctctagctagacagaaaagttctccaagtccccactcgacccaggaagtccagttggcttcacctctcaaatgtacacagctcctgtcatagttcaggctgctgtaacaaattactgtaaactgggtggcttcaacaacaagtgttgatttctcacagttctgtctggaagctggaagttgagtttagtgtgctagctgggtcaggttcctggtgaaggccctcttcctggtttatagaggaaagctctctctggccttttcttattagggcactaaccccattcatgagggctccacccttgtgaccttatcatttcccaaaggctccacctcctaatgctatcccattgggattagggcatcagtatgaatctggagcagggagaggggatgcaaatattcagtccataacagctcctaaagattttctgctcagctctaatttatttgttcacttctttgacaattttaactgtgggattgaggagaaagtctataaaagtccctcttattatgcttggtctacctgttttcactcactgatggagtagccagggggcttcatctagtggtttcctcacatattttatccacatgcaattcttgacacaccaactttggggatttcactcatccaagattgttcccttcctgagggagtagaggtttaggattctgtctggctgttgtcctcgattctgagtttgcttcctgaggacagcagctcttacttaggcctccaaaaggtagcttgttctttgcatttaagaatatcctccactgaaaagtgcagagcagacatattaaggtactccagggaaactgaaccagtaagatgtatatgtgcatgcatgtgtgtacacacacacacacacatataggtgacccctgaacaacatgggtttgaactgcacaggtccatttgtacatggagttttttttgataaaagttacatggagcatgcctgcctctcctgcctccccttccatcccctctacctcttccacctctgccacccctgagacagcaagaccaacccctcttcttcctcctcctcctcagcctactcaatgcaaagatgaggatgaagacctttatgatgacccacttacacttaattagtagatatatttctcttcgtcatgatttttaagtaaaattttattttctgtagtttgctttattgtaagaatacagtgcctaatacatataaaatatgtgttcattgactatttatgttattggtacatcttccagtcaacagtaggttattagtagttaagttttgggggagttaaaagctatacttggattttagactgcatggggagttggtgctcctaaccccatgatgttcaagggtcaactgttattcacctagagagacagatttattttaaggaattggatcacttgattatggaggctgacaagtccaagatctgcagagtagcctggcaggctggagactcagggaagggttaccgttcaagtctgaaagcagtctgctggcagaactccctcctgctcaggggaggtcattctttgatctattcaggccgtcatctggttggatgaggcccacctacgttatgaagagcagtctgctttacttaaggtctacccatttaaatgttaatttcatccagaaaataccccgcagaaatatccagaaaaatgtttaaccaaatgtctgggtgcccagtcaagttgacacataaaattaaccaacacagatttcccagaggctcgactgaagaacatttatgagacacaatttagttcaactcttaacgtgttccctgtgagtcttgaaggacgtccagcacttgtgtgggcacagcaaggagcactgaggcctgcagctttcctctctctcctctgctccaggtgtattcacagcccactagacactatttccagagcctgcagaagccgaatatccatggtgctctgaagtcctggtatctaggagcatgttgcagcctgctgttgtgcatttcccatggtgaacatgcaggttaggcatgttgcagttctagtgctttagcagttaaaaagggatgctcaacctattaaatgcaaactgtaccacacataaatatcttccttcacgtctcatttttctgtgccttagcatatccaaattatgtcccttaccaccagcccatacctgaagatcaacaaggtctgtacatgccactgtgagttctttgagatgagtgaaaatgttaataatgttaataatgacagaatccggccgggtgcggtggctcatgcctgtaatcctagcattttgggaagtcgaggtgggtagatcacttgaggccaggagttggagaccagcctggccaacatggtgaaatcctgtctttactaaaaatacaaaaattagccgggtgtggtggtgtgtggctgtaatcccagctatttaggaggctgaggcaggagaatcccttcaacccaggaggcagaggttgcagtgagccaagatcatggcactgtactccagcccagtgacagtgagactccatcttaaaataaaaataaaaataaataatgccaggatccattccaaaaacaagtatagactacagctcttaatctctgagttgattaagctggatcacactttataaggttcagaatgaggtcagaagaaagggctgggtaacatcagcatgttgttgacaataagtgaatactgatggcacaatgaatagggcagagaaaggcagagaagagtcaattggcaacgatcagaggcgcgttgttcctttctgggaagagcctgctctatagacttctatgcaacagacttaccatgcagcttcactagccctgcagagccatcccttcatgaattctaagggggtgccatatcaaattatttataaccagatttaaaagaaaaccctcacagttgaaatatgaagttattgtgttcaacttcttattactccaaaaagcttatacagttgaaccatgtctctctctccctttgagatagtacatccttcacaattgtggaatgattaatacagttggagagagggtaaaaattaatattttaatagaaatattgtaatattagtgtcatgacatcttccaaaaaggtagcatgttatattcttcttttctctttgaatttttgcatcttacattttgacaagtgctcctacattcactaaaatttaaactttgatgatacatggaatacattttttatttgaagttttggcttaaagatgaaattatgtcttgggcgctctgcttttgggagtagaagtgggtacattctttctggagggcaatttgggaacatataacaaaagcattaaaaataagcatgtaaggccggttgtggtggctcacacctgtaatcccagcccttggagaggccgagctgagtggattacttgagctcaggagttcgaaaccagcccaggcatcatggtgaaaccctgtctccacaaaatatacaaaaattagccaggtgtggtggcacatgcctgtattcccaactactcaggaggctgagctgggaggatggcttgagcctggcaggcagaggttgtagtgagccaagattgcaccactgcactcaagcttgagtgacagagccagaccctgttttaaaaaaaaagaaaatataaataagcatgtagttgaacagtctgcttcttggaatttaactcatggaaaatatcatagaggagggcaaagattaattgacgaggatgtttgttgcagaattattaatacaagtgacaagctgtaaataatgctaaatattcaaaaacagggaaattaaatcaattatgacatcataattatctactatacaatgagtattctataacccttcaaaatcatatgaaaaaatatgcataacatattgttaaatggaaaaaataatgcagaatgtaatatcataattttgtttcaattatgtatatgcacagaataaagattaaatgtataaatatcaacatgtaagctgtggttatctctgagtgaaggagtagtgattaattactttctgcttctgtttctttaacactttaaaaactttctataatgcagtgaatcattccttcattatattatagaaagttttcagagtaaatgataacttagtgctagggaagacctgcaggaggctagcgagtaaagggttaaacaaaattccacacatttacttcctaattttgctgttgcaaggagaatgggtatacagcaggaatgagacaaaactgagtgaaggaagaggagatcagcaaataataccaattaggcgttccctgcctgggaaatccctgaagatagaggagaaactagtctcagagaacccctagtgaaatcagtgaggctgattacacctaaaatagacttaaggagcacaaacaaaatgatgaaaggatgcagattggggaatagtgacaaagcaatcaaaatgcccctctaaggaaactgtttcctgggctctggctaggagccaggatcggggaggccaagcacagaaggcagatgttaaaagctgtgaggcctgcagggccaggtggcaatgtatggggacgaggagcactagctgtgagatcctggggagccatgagtgggcttaatgcaggatttctggagcttcttgtcttttgggatgagcttgagatccagacttttaggtggaatctcctaattttatagcttttggcatctctaaacatttaaaaaaattaatagcctttattctttagagcagttttagctttacaaaaattgagccgaaagtagaaagagttcccatacagcctcttactgccccactgtttccactgttgatacaatcattaacttgggcccatagtttacatgagggttcactctttgtgttgtgcaccctgtgggatttgacaaatgtataatgacatgcattcactgttacagtatcacacagaatagtttcactgccctaaaaacccgctgcattccacttattcatcttttcctccctccctacaagcctctggcaaccactgatctttttacagtctccacagttttgatgttcccaggatattgtgtagttggaatcatatcgtatgtagccctttcagacttagcaatatacattttattctgtccatgtcattttgtgcatgtcaccataacttgactgaggtataactgatgtataatatactgcacatatttcaagcctaccattggatgacttttcacctaagaattcaccagtgaaaccatcatcacactcaaggtaatgaatgtttatctgtcatagtcctcatatgccttgggaattcctttctcacagccatacctaccactctgtcctctggccgacactcatctgctttctgtcacttaagattagtttgcattttctagaattttatataaatgattatatgtactatttttgtcaggttttttttcactcagcataagtcgtggggggcaggcatttcccttggatcctgtagaagtctaaatttcgagaagctggcaagtcttaggatgatggctaataatgtggaattagagatgtgccctaatatcaaaaaccatcttatagagtatattagatctgaaaatagcccacagagttcttttcttcggggtcatgttgcaaaagagtctctcttgtcttgagcacagatgtgaagcatttttcaccattggatacaatgaacgttccaagcacaatggatgccttgggtgctgccattctctatgactgccatgttttgattgagcaaagatttcagacttccttcctctgtactttgacaactgcaaatttggaaaaagcattttcaatatgtacgtcgatcaggggtcaatatagactatgaaaatatatatactataattccaattaggttttaaaaagctattgaaggaatgaatattttcatctggaatgataaacacccaaagattaattagaataatttcttgatggtgagaacatgagtgatttacattttcttttctgtacatctttgtgttcttcagtttttctaaaatcaatgtttcttataaataatgtgaaaaaaattatattaaacctcaaatttgggggtttgatttggaagacattagcaagtaatttggaataagttcccatccccaactaacttggatcctgtagtccaagtaatagtcatggtctatcattcagttacttgtgctaggcactgtgttagatattaggtataaatattaacagaaggcagggagtgaagcccccaggcatagccagtcatgttgccctggaacacaaagaggtgtccaatctcctgcaggaagaggagctgctgccattctgggaacctcaagcttagttcagaggaaacatctatgaggagaagacccaaccaccttcaacttagaagaagcaaaagagttctgtggacccctctgtagagagggaggggcatgtgattcaagaggccacctggatatttcagttgaagtttatctttaaggctcgctgcttctctgctgtcatttataagttcattcaataaatactgagcactttctatgtatctgcctttaactgttgagttgggagaacgatgagctaagagtgagttttacaaatgcgatgcttgagacaaaggtgaggggagaaaaacgtgtccataacaggtaagagagatctcatgttttactcacccctggttgtccagtgagagaaaagagcactgcactatgaatcaggatgctgaggctccatggtcatgaatgagttattctaaactctgagtgggctttgattttctcacttgagagtattggtctaaatgatctttaacttctcatccagatctaaaatttatgaggtaatatggttcacagagaccatgcataggactaactgcagaattctgagaggagatccagtactgattgacaaatgctaacctttgcagaagtagactcccctacacccaatttggcacttccgtgagattaagcagaattcttcatgtcaccagaaagcagctaagtcttatgatggtgacccacttctcttcagtttctcttccatacagcatgacccataccaactctccttctaatcccaaaagtttgaggatgtgttcaggatgacttggttgtaaaaagagaatgagtatttgagttttgatgcccagtttcaccgtttattatctgttatctgttgaattgtgtccttctcaaatttatatgctgaagcccaaaccctgagtaacccagaatgtgaccttatttaggagtcaggtcattgcaggtaataattaattaagatgaggtcatactggagtaggatgggcccctaatctaatatattgttgtcttcataaaaggggaaattcaggcccagagccttgaacacaagaagaacatcatattaagattggagttctatattacaagccaagaaactaccagaagctgaaagacaggcctggaaaagatccgcccctatcacttcaaagggagcatggctctgctgacaccttgatcttagacttttagccccaggaccgtgagatgataaatttttattgtttgaggcactcagtttgtggaagctttactctgaactctttactctctatggttcccagtccctaaaagcgccctgacttttcttgttcactgacatctttgtattctttccggtcttcggtgaggactaaatgtttccacaagaaggttgctcacccctccattattacatactcttctgctgagctccaacctggcctttgaatcattggtgctcaaggtgaaatccatttcatggcataaataaataggtaactttcctgaattcaatagatcttgtgattacaaaaatattacatattataaactcataattgaaggtaaactgaaacctctatgaaattatcttgttttctactacttttcagtgtgtcttccttcttatactagaatactttttagaaatgaaaaattcattacaacaaaatttacatttactaggcagctgtctgctatgatttgtaagtacatatatcttttctattatgaaagtttggaggtttttttagctttgtgtatgtgtgtgtgtgcatgcacacgtggtccatgaaaagtaactgaatgagtgcaggtgagattcaatgagaagaaccatttttaaagcaaatgtcagacagacacagacaccatggttagttgtttttttttttttttttttttttttttgagaccgagtcttgctctgtcgcccagactagagtgcagtggcacaatctcggctcactgcaacctctacctgccagatttaagcagttctcctgcctcagcctcatgagtagctgggactatgggcatgcaccaccatgcccagctaatttttgtatttttagtagagacaggattatacaatattggtcagtctggtctagaactcctgacctcaggtgatccactcacctcagcctcccaaagtgctgggattacaggcatgagccactgcgcccagctttggttagttggtttttgacagcaatgataaagtaatgaacttggtgtaaaaccaccagattcaggtcaagaaatttttgaaaaagatttttccttatttttaatgatagcatttatttttgtcagctcttgaaattagtaagagggctcctatctggtttattcattctctgtggcttctttaaaccttgcctccacctatatttgtcataattagtgagattcctaagttccaaggctaacagaatagcatagctgtaaacatagcgtatcatcatttgactaagcagaatctaagaagaaaacaacttcatttctgggtagtaatattgcattatggacaagaatatcttctatgtgtgagttataaatacttatttagtttccagaaaaaaattattagaagtacttataattagatgcttagacatgtgtatatgtgtgtgtgtgtgtgtgtgtgtattaatcattcctagaatcaaaattttctcagtggagaggatttttcagtactctggcaagatctttcaccccttcctggctgtccattgaaatagaggtcatatgggctactgattatgaaggtagtaatttttcaaacaagtaataatataatgggtcagaccagtggtttgccagtgtagaaatttgaggcattgtttaatggaagtaataaaaatgtgctaagtacctactgtgtgccagattctgctaggcaatttatatccaatgccatatctaatccttaaaattatgctttattaagtagatatcttcatcttgggtttacagatgaggaatctgaggctgagagagaataaccacttgtccagggtcatagaactggtaagtttcttgcctctccatataaacctctactgtttgtccttattcacaaagtaacttgctgggattttgactgggttatactctttttaatacttccaggaaactcctcctttatgtaatgtcatcctcacaagtcctcatcattccaaatttttttaacttgaatttttttattaacgaaatttttaaactaagtactatacatgcatggttcaaaattcaaaatgtacaaaaatatagaatgaaaataattgttctttctgctcctgttcctcaccccattaggcccattcccacagacagcactcaaccagtttcttgtgtttattctacacattgacacacacagatgggcagatagacacagacaagtcacagacacagacatactccctgcccccactccctcacatgtacatgttagcataaacatagtgagttcatagctatataccttatgtttttctcttgactatatatatatgtgtgtttgtgtgtgtatgtgtgtgtatgtatgtgtacatatgtgtgtgtatatgtatgtatatatatggtgtgtgtatgtatgtgtatatgtgtgtgtatatgtatgtatatatatggcgtgtgtgtgtgtgtgtgtgtgtgtgtgtgtgtgtgtgtgtgtgtgtatatattagacaagaaggtctggccgtatcacccaggctggagtccagtgatgcgatctcagctcattgcaacctctgcctcttgggctcaagctattctcccatctcagcttccctgagtagctgagactacaggcatgcaccaccacgcctggctaatttttgtattttttgtagaaataggttacgccatgttgccgaggctggtctcaaactcctgagctcaagtgatcctcctgcttcagcctcccaaagtgccgagattacaggtgtgagccaccgtgcctggcagacaacatattttggaaatccttctagaccctgaacagtctaaattgtacatctataaaccctggtagatccattagtactaaagttgtctaaaaatatatatattttttcagcccatacaacctcttacaaatgtataggtggtattttctggatttgatcagaattgagcaggaagagagtgattccctcccatagaactgtattttgaagaaggagtagctctattgcttacccaaatcagtcattaaattataagggtacacataaaaatccaaattgaatactcatgtaccagaatgaagcataaaaaacaatgataaaataagaattagagggcacagtgtgcatagcaaataactaagattaatataaagataaatgatgcaaaatctgaaattaaaaagtgtttggtgtataaacacagacttaaggatgaactataaaaaatgcattcaagatgaaaaaaatgcactcaactgaaataacagaccacacgtcccatttctaacccttaattcctctgaagaacaattcataccaccaagaagaaaaaaggctcttagatgtagaaagcaaaactcttatcaggacagatgtccagcatttaggaaacaacttggtcacagggaaaaaaataatctcttttccccatgatgaggcagcaaagaatagatcaaaaaccatcagacagggaaggtgagcagggggctaaaaaacggggaggattttcacattcagaggcacaggagtaaagagcaggcaactcgttggcaagcaggagaaagatgcatatgttttctctgtattaatcttagccatggctctaacacatctacctttctcttcaattgcttcccaggctttgagccatttcttcctcctttgaacacatagactggcacaggaaggcataggctggcatcctagctccaaagctatgcatgtctgccctgcatcatccacttacaaattctctaaggtatctaattcagtatgtcatgaacatacattgagtccttcttatgtgcaagttggtgctaggtgccggcatgcaaaatgaaagtatgcagaacatcccttttcacttagtcttgcctcagctgtaaaaagagagagtaaaatgaattgctttctaataaggcacttttctactctcagactattaagctgtatgatacacagctgcctctctttactggctttcagaacattccttatagtagtccttgattcgatggcttccattggtaaccaatggtctcaatacacccatgagatatcccctcttggattctgctattcagtttctaacaaagactttctcttttgcaaataatgcaatgtttaattacagtcatgcttatgatttgagatcttcttagcttatgtccttaggtctgtattcacttataccaaatttttagggattcttcttgaactcttctctaagccctgttttgtaaacaacaacttggctgtgtgtttgttacctttgcacttacacagaaatgtgtgtgtgtgtgtttgtcttatttctcaaaggatttgagacaagctagggaaatacataaatttgcaaaaggataaaataagaatcccagaacccaggaacataagggaaggagaatattaaagtagatactgcgtgaatcagttgcttgatgtgggggctgcaaatttggctccaagcttcataactggccaaggtaaagaaagaaacaccatcctaagattcacatggtccaacagtcctggataagctgctttctatggggaagtacagctttcctggatactgaagcctgcaagaaatctctccctggatccccataaaatgacattgggaaatgtgtttgatgatattaaaaataccttacaagtttcacaggatgtttttccaaatcatgccctaatgcaggctgatggcttaatactaaagggtaatttagttaatgcaaggctaggaggagcccaacccttattctcaacttcaatcaatctcctccatcagaatgaggatttcttaattctattctgacgtgcttagggcttccatctagggtagcaatattaaatcaattcacttaaattagaaatactaaaatttcaagcagcagtttcttggaatttaaatgagataacaaaaggtaaggaaagcaagcttagcatagtacctggcatggagtaggagataagagattgtaagtttccatcagtccctttgtatgaggcactgtgctgacttccccagagaaaatgatgagtttgacaactcgacatggtgaaaagaccacaactttggagtcaggaaaacacagctctgtcacagagcttgttacccgaggtctggcagcctctgttttctcttctgtaaaatgaggataataaccagtgaataaataactagaaacattacatactcacccttagcttagtgcctggagcatagtagggacttaatacattaagctgctttcttacttttaaaatcatgcaatcgagcaacgcgtaggaactaaaaaagaccacaaacccaatgacattgagcacttcacaacgtatagatcacctgcagccttatccttccaaatccaaaggaaatctctttatctttttgaaaatcagtcactccctagcaattctcttggctaaataatcaatacttttagccctttctcacctatcaagcattagtattattacttcctgtcccattttgttttctctgctctccttcaagatatgggacttcaaactgggtgtttccgtgagagaaagagtgacctgcctttattaggaatgattgtgaatttggggaggatactatagatgatggttcatttactcaacagttattttgaaagtgcttcctatgtgccagacactgtgtttgtgcaaggttgatgggattgcagcttcgtttaagccttttcctttaagtatttaaggcttttcttttaagaccaggtgagtacaggaaagctcaggggctctgccattctaggagaaaggcagtgaactatacaggtgcctccattgtggacaagcagactggtggttaatggccatgacatcctttggaaacactgatgatgctcggagtctctaagttctctcacagagccctccaaggttctacctgtgctaaagtctcaagggcagggtcatgaatccatttgagaagctaacaaaatctatgaatcttcttaacagaaaaagacccatgctacattttcttcacaatttcaggatgttcaaagatccccctgaagttcctcttgtggccacccccccaccgccccccagcagagtgccagagtgagacgcttttgtttgagtgacgtgtctcaagtcctgccatggaccttgacattcggtcattttcatcaatgaattgggttacgaagacaataaagacgggtcaaccaaatgtgtagttaggacaaaggcaggaatgagagaaatcccattgcttatcacacccatttaatatgacaacattggacagaggcaaaataaaccctttcatttacaccctgttaggagctgaactgcatcctccccaaaattcctacattcaattcccaacttgcagcacccaagaatataactgtatttggcaatagggcctttacagaggagattaagttaaaaatgaagtcgtcaggatgggcctcaatctgaccagtgttcgtataaaaaaaggaaatttagacacatgagaaggcaccagaagtgcatgtgcagagaggaaagaccatggcatggggcagcaatagggaagctctctgcaagccgaggacagaggccttgacagacgaatccaaccctgcccatgccttgctcatgaactttcagcctctggaactgtgggaaagtacatttctgttgtttaagccatctactctatggcattttgttatggaagccaaagcaaactaatacagacctcaaaaggcaattccatacgaatagaagagcagatggggatatgagaggcatctgactttaaggcagccttgtgaaagctatatgaaaatgacataaggctttaagttgatttcaaatgcagtaaaaataaaatacttcttgactctccctaaaggggccatcctcacagaacccctgtctttgagagcagctgtcttgcccgcggacttgctttttgccaatggggtgggagcagacgtgagtaaggtggacctcttccaagtagtggcccatcactgacctctactttgacgcaaaattagcagaatgaaaagaatgaaaagatgctgtttccccctgggtcctggagtgaacacagtgtacagcacagtcacagctgacatgtggtggatgtgcagctgcataagaaataaacatttcttttataagccaaataacattttgaggtcttaactgcagcgtgagttagcctgagtggatgtagacaaaattgatgaggtgatgtgactgtctagcaaagcttacaaggtaattctttttcggttatctttgcttagatcgtagcaggaacattgaattaagttatgggaaacctgcattcagaggtcaaatcgtgaactgtgttgtccgtaaaaaagaccatgctgatggggagatttaaaactaagtcatatgggccgggcacggtggctcacacctgtaaactcccagcactttgggaggccgaggtgggaggatcacctgaggtcaggagtttgagaccggcctggccaacatggtgaaacttcgtctctactgaaaatacaaaaattagccagatgtggtggtgggtgcctgtagtcccaggtactcgagaggcagaggtaggagaattgcttaaactgggaggtggagattgcagtgagccaagattgcaccactgcactccagcctgggttacacagtgagactctgtctcaaaaacaaaaaacaaactaagtcatatgaaagaaaatgaaaaggaatggagaatatttagtctggaaaaaaaaaaaagggagaaacgcctgtgggaaatggactgtacccggtctatggagcctgactgggttaccaaaggcttttgatgaaagaattggggaaggaaatttttatttaacatttatgtttaaatttacatttaaattatacttactgttaaaaacttttttttgtttatttatttgagacagggtctcactcctttctgcaggctggagtgcagtggtgcaatcacggctcacttgtagcctcaacctcctggactcaagaaatcctcctgcctcagcctccctactagatgggactacaggtgcatgtcaccatgcccagctaatttttgtatatttagtagagatggggtttcaccatgttgcccaggctgatctcagactcctgggctcacgtgatctgcctgccttggcctcccaaaatgttgggattacaaggcatgagccactgtgccaggccaaaaacttattgaaaaggaagaatttcctcacccttagaactgttcctgaaatgttgtgagaacctcctcactagtgatattttgttggaaatactgaggggggagttcatgggttgtagtgatgttgggttggtggttttcaaacatttgcagcagtttaataaaacctaatatgaaacccccaatataatagtggtcattataagcctaagtgttttatatattcaaaataaaagcatttaatttgtataaagccagtcactataataatgaggcccttttgatgaacatacagttttgaattgggaatatttattcatcaactatttatcaagtagtctctatttgccaaatactgttgcacatgttggaaaaacacagcagagttaaggagcttatagtccagtagatgagacagtctttcagccacctaaccaataagtcagataactttagatggtgataagtgctatgaagaaaataaaataaggtaatgtggtagagagaaggtggctggctgtagacgtgttaaaatatcatggaaggcctctctgagaagctgagggctctgagcaagattattccagacagagggaatggcaagacaaaggccaaggtggaaatgaatgggggcatgtttgaataatagtgattgcaatagtctgccatccagaagaagagattgagaggcaggcgagggaaaaatcatggaggatcttttaagctagttctcaaactatccatggtaaatgattaaaaaagaaaaatgttccagccacagactaacacgtgatccaactgcacatgactcattgcattcagcctgtgctccgtgatcatcaccatgcacgtttggcaacctcacagccggactctcccctcttgaatgaaactactgatcgtatgcctgaatgttatcccaatgtcaaattgctatgaaaatttcccagtgttgactctcaatttctattcttattgttcttaacttgatgtaaaccaggaacacaccattcacggatctgttggccacactttgagtagcacatgcaaagcacctcggattttacttgaagtgcattggaaagcacacatggggaggtgggaaagagaagactcaaagatcacttgtagggttgtggtgatgctgctctttgtggagatggagaagaccaatggagaacacatttgggaggagagagcaaaagttctcaacttgggtgagaaatatctaaaccttcaagtagagaggtccagtaggaagttagataatatgagtctggggctcacaactgaggtcaaagtcagagttgtaattttggaaagtcatgatagcctgcatttaaggcctcagactagctgagttatctagcaagtgtggaaatgaaagaaaagagatcctaggacttcgacctggggcattctgacataagaattattgactccatcagttttaacatccaagaaattttatcttaacatttatggagccccaaggcttcacaaaaacctggaataaaattcccaagtgtcacaatgctggcatgaagtggcagtcaataaatatacatggaatgaatgaatgagctccaaaataaaggtttcaaaaacccctgagattttgcgattttagaaccccaagtttcttcccacccatgatgtgttaggttgaatggtgacttccccaaaagatatgtccatgtctcagaacctgtgaatgtgactttgtctggaaaaaagagtcttctttgcagatgtaattgagtgaagaatcttgagatgagatcatcctggattatctgagtgggctctacatccaataagtgtccttataagaaacagacatggaggaaaaacacagacagatggggagaaggccatggggctgtggcagacattggagctgcggtttcaagccaaggattgacagcagctgccagaagcttgaaaaggcaaggaggattctagcctagagtctccagggagagtgcagccgcctggctgacacacgccagtcctgccaacaccttcattttagacttctggccttcagaacagtgagaaaatagatttctgttgttttcagtcatccagtttgtggtcatttgttacagaagcctcaggaaactattgcacatggtctcttttagctgatgctgatgcaatatttcctttggagctctgctgtattctgattcagtgattctcaactctggctgagcattagaattgcctagatgttttctaacaaaggttggttggtgtctggaacatcctcagagattctgattcagtagggctgtggtacaggctgatattggtgtagagtcagacataagaattgccatttaattagtcacaacaacttaacatcaaggggtggcacagaggtacagggggtgggaatacctatataattgtttcaccttaggaatttgctttgaaacataacaatatgtgtctttacattcaagtatattcttagaaactagctgaagccgtttcgcatccttgtggcactaagtcctgtttccactgtgaaacagttaccaagacagtcctgtttccactgtgaaaaaataaatggatgttctgacaggtggccaccattgctgacctgaccattctccagaagcaccaggaggcattgctttctagactgaagctcagtcatgcttcactttagtctaatcaaaaagatttgcttgcaagccttcattccaaatggttccagtgccttccatacaatcagataatgacaattgtgagtttctggtggcatgctacttcatgtaattaaaaaaaaattgctgcgtagatgtgctgaataggagaagagtaagttattatttggagggaagaggattcccaattgtggaacaaagcaattccttgtaccctggttctacataaatgtttctttatttttgaagttgcatgaccccctgttgtggtcttttttgcacacatgtcagaaagcagccatgagtgcattgtagttggcaatgtgagcttctgtgtaaagggtctttgacgaagagctcactgcatctactgactccccaggatgtctgaggtcacaagtttggctggagcacatgagcccagataaagaagatggttttgccctcctgaaataaagccagaagtgatctcctttattgtgcactttgggtcatgtgctaatgatgagggtttctgtaatactaatccccctaatgaaggcttctcccagcccttacacaagcccccaaggccccgtggcttggcaagccagagagaataaaagcagcacggtgtttggcttttgaactgagttcaaggcaattaaagtcaagagctaaggagggagggagagggtttagaaataccagcataataagtagtatgactgggtgctctgtaaattaactcaattagacaaagcctgacttaacgggggaagatggtgagaagcgctaccctcattaaatttggttgttagaggcgcttctaaggaaattaagtctgttagttgtttgaatcacataaaattgtgtgtgcacgttcatgtacacatgtgcacacatgtaacctctgtgattcttgtgggtatttttttaagaagaaaggaatagaaagcaaagaaaaataaaaaatactgaaaagaaaagactgaaagagtagaagataaggagaaaagtacgacagagacaaggaaagtaagagagagagagagctctcccaattataaagccatgagccccctttggtgggggtttctgctcagttgcttgggctgcaaaatcctgccaggagcccagggtcagttcccccgagtctgcatgacggtggacagcctagtgaacaaggagtgctgcccacgcctgggtgcagagtcggccaatgtctgtggctctcagcaaggccgggggcagtgcacagaggtgcgagccgacacaaggccctggagtggtccctacatcctacgaaaccaggatgaccgtgagctgtggccaagaaaattcttccaccggacctgcaagtgcacaggtgaggcccatgctccaagcttggtggggagggccagagctggggaaagagctccttctaaggaagagatgagactcttgacagagactcttagattaggctttgaaaggcaaaccaatgatggttttggtcggaagcatattcaataaggctgatgtgctggtttattcttcacaccctctagtacatctagttatgaagactaaataaatatggcgtgggccaagcctgcttatatgaatgcatgccaacatactattggcttgtttgttggaaggggaatttaagagcttaaaagcgtcagctttgaaactcggagcaagtcctttcaagatggattcggtgccctctcctgaaatgggtttgcacttgttgaaaagggatgggtgaagcttggcattcggaagacaggagtcaaaggcaggtgttctggtctcagcatttctcatgatttgaacagatctctctctctctcttttttttggagatggagtctcgctttgtcaccgtggctggagtgcaatggtgctatctcagctcactgcaacctccatctcccgggttcaagtgattctcctgcctcagcctcccaagtagctgggattacaggcacccgccatcatgcctggctaatttttgtatttcgagacggggtttcaccatgttggccaagctggtcccgaactcctgacctcagcagggtgcatgtttctcattaaagcttatgaccaggttgtaactttgacaaaattgtcgagacgtggcaagacagagctttctcgaggagctgggggtggggggggcgggcggggggttgttattagataacaatggctttttgtcactcttctctggacttgaaccggacatcacaaaatttgctcagtgtccttcctttagactctggtctctctcattacctgttgctttgacatctctgtgcatttctcattcctctagctctttggggctttttcaaatcctcttcaatctttcccacctccagtttccagcagccatatgcccttcgggaataaacactcaaagcctggcagggggccactgaaatacaaaaaacacaagtggcaacctcaggaaagcccttggacactgttgtaggctgggtggttgcagaagactttttccttttaaaaatactttttacttctcttctcataggatgctggaacataggaggatataggtcattgagcttcataaggggttgaataggtattactaagggaacatacaaaggcctgtgatgttggtgtaggaatgacattcgatttttttttttaattttaactttcaactttattttagatcctggggatacaagtgcaggtttgtgacatagatatattgcacagtgctagggtttgagatatgattgatcctgtcacccaggtagtgtgcgaagcacccagtgggtagtttttcaacctttgacccctccctccctcccctctctagcagtccccagtgcctattgttgccatctttatgtccatgagtgcccagacattagatttcttttttcacattaagagttctggctttaggcctggtgcagtggctcacgcctgtaatcccagcactttggaaggctgaagtgggtgggtcactttgaggtcaggagtttgagaccagcctggccaacatggtgaaaccttgtctctactaaaaatacaaaaattatctgggtgtggtggcaggcacctgtaatcccagctactctgggggctgagacaggagaatctcttgaacccaggaggcagaggttgcagtgagcagaaatcacaccactgcactccagcctgggtgacagagtgagatctgtctcaaaaaaataaataaataaataaatagttctggctttataatcattttgtagtaatatttttaattctgtcattcagaagaatatctaggtcctggttttgccctgggtattaatcatgacaaaaatttcaataacatattggatatatattatccagcttttctaagttttttaagcatttgcttctatagaccttctctcaaaattatcatggtgttttagacgaatgaggagcaggttgctggtgtggttagcgtgattgaaaaccacactaacacagtaacttctttgttcaaaaccccaaaatacttctagaacaattatttctatgtcaatcaatgaaaaagtgctggccaagcgcagtggctcacgcctttgggagccaagcactttgggaggccaagacgggtcaggagttcaacaccagcctagccaacatggtgaaaccctgtctctactaaaaatacaaaaattagcgaggtgtggtgatgggcacctgtaatcccagctacttgggaggctgagacaggagaatcacttgaacccaggaggtggaggttgcagtgagctgaaatcgcgccactgcacgcagcctgggcaacaatagagtgagactgtgtctcagaaaaaaaaaaaaaaaaaaaagaaagtgccaacactttcaaaaagttgtaaatctgcattgcatagaatcctgaggcagaggactttaggaagtcacatataaccataaactctttttgttaccagcttcttcatatttttgccatggctagcaagttttgttttgttttaggtagggatagaaagaatagaagggatcattgctatttccctttggtaaggaaatgtttataaatattgctctagaagtaataggaacttaggatcatggagacctaccttcaaaaaaaaaaaaaaaaaaaaaaaaaaagaggctccccctgctctaaaaagcccttgggccagaaataaatagggcctgttctttaagtccaggctgtaaggaagtcccatgtacataagccagtccaaagaagcagggcttcctccagggagatggtctgcctctccagccattgtcaaggcccggcctggccctgaggccccatctccaggctgtggctcacctccccccgtgatctgctcagtccaaactcatcaggaacagaactctttccacacctacatttttttaaaggtaacttaagatttactgtatctataagttcaatttactagacttttaatgtttcccagttttattgaggcataattgttacacagaacactgcacataattaacgtgcacaatatggtgtttggacatacctatacagttgtgttgccatttccacaatcaagataatgaacatattcatcatctccaaaggttcctcgtggttctttgtttttgtttattttttgcttttgtggtaagaacagttaacatgagatctgccctcttaacacatttttaagtgccgaatgccttattgttaactataggcactatattgtacagaaaatctctggaacttgctcatcttgtatcattataactttacaactccctatcgcccctcccccatcccctggtaaccacaattccgtcgtgtacttctctatgttcagctactttagatgcctcatataagaataatcatgcagagtttgtccttctgagactgacttatttcacttagcacaaatgtcttccaggtccatccatgctgtcgcaaatggtagaatttttttctttttaaaggctgaataatattccattgtattgtcataccaactttggatggctctacttatcttgctagatggtctttttctttgaatctcagggcacgagactaagtccttagtgactgagctgggaagttattttgtgtatgtcataattaccattctgtgatgagccgtgtgtcccaaagcaggacacatgtccttcaattaattattccccaaagagtaagttgctagccttcctagggtagcttttttatggtttgtggggcaatctttggaattgaaacctgatcctgagcctcccagagaacatcctctacagtagcctgatgactcttttgcgaatggagtcactggggcactcctgggatgatccaaaatttctcaaggaagagatgtagattagtgtcttgtaacagactattgatgaccccaaatgttgttaattctttggaaaataaacacctcatagtttccataatcatgaagctggtaaagtaatttcagcctaataagtagaaacacatagaaattctgggatttgttttttaaaactctaaattctatggtgaaattctctgtagagagcttctctatagtctctgtagggataaattgaaacaaaaaagccactgagcttaattgtcaggaagagctgaattgcaggagactttgaatttgctattcaccttataaggcttacctgccagttggctttatgagaatatgccatttgcagctatgtcttttggcttctgaaaaacttgcgcaccaaatagtttttgaacagttgacggtgaacttcttgtttgtacaagtgactaattgcctccattttccaatctctgaaatggggataatgatgaaaccacacttgtaaaatccttttgatttctgtagatgaaaggacctatgtaagtataaagtattgttattaaaataatagaatctctaattaaaaggaataggctatttagagttccttgtaaattcactaatcggtggtctttaagcttatttagtctaatggctttctgaggttgagctgatgcagttcatgtaggaatgtgtggtgtttagatgatctcactcttttttccatttttatcatagtcctttgtaaacatgagactttgactctttaaatttaattttcactgaaggacatactcaatggtcgatagattgatattatctaggaatcattttttttcctctctccatttcccagtaagataacacggttctttctaaaacacttctcttcttatattttttgcattggtagattaagaagaaaaaactaaatcatgttaaattgatggaagatgctattaggaaaactaaattaaagaaataaacattttgtctgctaggctttcatgttgttacacttttcagtcatctccagcatttcaacaaattcttcaggtcaggtctataaacttagaaatgaaagggacctgactgcagagctttggaataatttctctgagacatcttggaaaaggaattttttaattgaataaatttctgggtcataaatgggctccaaaacagacacaagctttctttacccccccacttcccattcttttcacagatgttgaaagctttcttattagaacttatacattgccttttggaggcaactctggttacattaaagtttcttgttcactgtagttgtgaagcatctctgattttctgaatcaggattaatcatttcgtcatttgtcatccagtggagcttgacttattcctctgttttcacttttcccacagtttgacttgtgttgaaatgtcattgtgtacttgtccttcatttccactagactaaggtattattgcctcatttatacagatgctccctgacttatgatggggttacatcccaataatccatcataagttgaaaatactgttaagtcaaaaatgcatttaatacacctaatctatgaacatcacagcttagcataacctaccttaaatgcactcagaacactaacattagcctacagttgggacaaagcatctcacacaaggcctattttataataaggtattgaatatctcatgtaatttactaaatactgtactgaaggtgaaaaccaaaatagtcatatggatattcgaagtagagtttctactgaatgcatattgattttgcaccatcctaaagttgaaaaattttaagttgaaccatcataagtcagaggccatctgtatttgtattcactagtgtctgatcccttttattcaattattcattgattctttcaccacccatccaagcaacatttatttagcatcaactaggcccttcagatacagagagggggaaaaactgacgtgattcttaagatgtgcacagtatagtcatatgtaagacagatatgaagacaaacaattgctatactatttgataagtggtctctaataatactagtaataataacacaatatagaactcacggcagggtgcggtggctcatgcctgtaatcccaacactttgggaggccaaggcaggtggatcacccgagttcaggagttcaagatcagcctgcccaacatggtgaaaccccatctctactaaaaatacaaaaattggccaggtgtggtggtgtgcacctgtaatcccagctactagggaggctgaggcaggagaatcgcttgaaccggggaggtggttgttgcagggagctgagatcacgtcactgcactccagcctgggtgacagagtgagactgtcttgacaaaaaaaaaaaaaaaaaaaaaaaaaaaaaatatatatatatatatatatatatatatatatatatatatatatatatgtatgtatgtatatatttaactcactgtataccagatgtagttctatgtgctccacattaatgtgcttgttttttataacataaaagctatggtagcataaaggaagatgtgttgattgttgtattttttaatagactttagagcagttttaggttcacagcaaaactgagtcaaaagtacagagagttgccaaccccctgccctcacacactcacatctccctcactgtcagtgcatgtttagtgttggctaccttttagatagtagctgttcaataaattgtttgttaaataaatacatgagagagccaattattttgtttctgccaactacaaagaatcatggcaaagaaaataagagtagtcttcaaattcatggcataagttatgaatgactcagtttcaacagtcaggcccccaattcaaaaacaagtgttatgcctttaaatgtaaaaaggtattaaattattattataaattttaggtgtgttatttattaatatttttaaatattgagactttattattttagatcagttttggattcacattgaaattggggagaaagtacaaaaaattcccatctaccttctcccccacactctgcaatcttccactagcaacatccgcaaaccagggttacaatcaatgaacctctaccgacattattatcatccaaatttctcagcattatgaagcaaggaattactcttctactgcagagaagtgactagacatttacctccaatcagctatagataggcagctggaaatttgactgaattttaatctgggtagctactcttctttagacacagcattttgttcactcagttctcaaaacagtgttccattcctgtactgtcatagtaggtgatatgttttaatcaaatctgtttttaatacatacagttttagtaaggttgccccagggaaaatagacttcaaggtccataaaacgaagcatcttgcatagcatctgatgagatagtagccgcttcataaatatttgttaaataaatagtttgtatttaattatctccaggaatcaatgtacattttaatgtttaacttaaactattcaaaaacattgttagtcttgggaagagtagaatttttccttttttcaatattttaacttatgttctcatagagtgctgtaaaagaaaaatacagataattgagctacgtaaaaggtgggatatatgatatattataaaaaacaaaaaaactcaaccgattacaattagaaaaaattctccctacttacattttaaggaaattttctttaactatcagaaaatccactgtagaaaaggaagcctgtgcattttctttacagaatgctgttaatcattttgttttcatgctgttggaaaattttcctttccttgagagatccaaataactccccctcccctatggtcatagtactttttacttacctctattttgctacttgtagtttaccaaaattatttataggggctgctttttctgcaaacccacagaacagggagagaaaatgtatgtggcatcatctgctacatgctcgatacttctgttattcactcaacacacatttgttttgaacaaggctaagcacaggcctaggcagtgagttcacagccttacagctgcctggagctgaaacaagtgtagtaatgtttacaatcagtgtaaataaatgtgaagaaaggggatgtatgaggtgcaaggaagtaactgacccgaaccccgacctttggaatcaagaatgaccttagagagcacaaacgtgaagcttaaaggagaaatggatcacgcaggtaaagaggaatttagggagacagtgagggaaaagtgtttcaggaagaaggaaaagcaagcaaataggcctagggcatgaggtagaggaggaggagtaagtgagctggtcaccctctttaaatgctttacgtaatccctttaatcttctgggagataagcattatcatcccctttcgtttcaatcttgtgctctaatgatatttaaattttaccctctaacctaaggaatgaaatgttggtcatacccaaaggcaataagttggaaggctaagaagggaaaagtctggggcaagctacaaggatgtaaactttagatgctgatcagagagatgcccagagcttgatcttattagtcctgtcctccttccctgggctttgagaaagcagggagctttgtgcagctgacagaaatcctgtggtggtttgtacttcctgacatcatggctactgattcaccctgaggacttgacagcttccgttgattttgtcttaatgctgtcaacttcgtgaaataagtcagctttttaaatgtgagatttcttctaaattcctagaaatcagttaatttatgtatttattttctttctttctctctctctttctttctcttcctttctttctttcttttctttctttttgagacagagtcttgctctgtcacccaggctggagtacaatggcatgatctcggctcattgcaacctctacttcccgggttcaagccattctcctgcctcagcctctgcagtagctgggactacaggcatgtaccaccacgccccgctaatttttgtatttttagtagagacgaggtttcaccatgttggccagtctggtctcgaactccagacctcaagtgatctgcccgcctcggcctcccaaagtgctgggattacaggcgtgagccaccgggccaagccatgtatttattttggtttcatctttagcttgctgtgtattttcttccttctctaaatcaatgaactgttctgtgtcatccctttttgtgggcgtggagtggacgcaggaggagacacgcctgcgatcctgggaggaaggagtgtgtgcatgagtctgctactgctgccgtaacaacatcccacagactaggcagcttaaacactgaaattcaccctcccacagttctggaggatggatggctgagatcagggagttggtttcctctgagggctgtctccttggcttgcagatggctgtcttctccctgtgtcttcatgtggtcttccttccaaaactgtgtccaaatttcctcttcttttgaggacaccagtcatattggattagggcctactctaattacctcatttacccttaattacctctttaaagacactatctccaaatatagtcacatacgaggtatactggggctaggacttcggggacacggtttagctcattgcagtatacagtgtatttcatgtcctgtttctttgctgggaatgtgtctaggaaacnctctagtgcttagtccacttggagatataaacatttaagaggagaccatgggaggaaaattgactttctttgcctttgtgtaagcaccttcatcttctcttccattcaaatttcagagtacaaattcagaaatttcttccaaacgacataaacccccttcctttccatctttctgttttgtgaactaggaaactttgccggctataattgtggagactgcaagtttggctggaccggtcccaactgcgagcggaagaaaccaccagtgattcggcagaacatccattccttgagtcctcaggaaagagagcagttcttgggcgccttagatctcgcgaagaagagagtacaccccgactacgtgatcaccacacaacactggctgggcctgcttgggcccaatggaacccagccgcagtttgccaactgcagtgtttatgatttttttgtgtggctccattattattctgttagagatacattattaggtgggttttttccttggctgaaggtatattattacaggtttgtgattgggttgagggtatggcagtgggaagtaatttcatgcaagttaattaagagagcaaccacaaggcagccttaggtttatgaaagtcgtagaattatcaaataccgcctggagttagaaggaagcagtttcttcctgtgcattggatgcagacactttaaatgttctctcctctaccgtatgttcttggttcaaagtgtaaacttttctctgtgaagctgttaatcatcaaagatgtgagttggtgaggtggaggcgaattccttttgatttcagaagaaaatatttgcgaatctggccatggaagccctctctgaccttttctccaaattagaggaattaactgaacatgtgctaaggcacatgaagcttctttgtgcggaattagagtgctcatgttgggagtgggcatcttgttaaactcacaggatagatcaactttggatggattttagacagtctatcacatgatagactttcagataatcatttatggtactcctgcatggtccggaatccccaggtttcttggagctttattgtcaaggaaaagtacaagcttagccacagcaatgtagagtttctgctgcttagctctttgcaacacagtcatgttggatgcttgagaaattggtgacctgcccttccaagtcttaaaaattgggggctgggtaggacttggaatgagggggttgtctgttacaaacttcatgtatcaagtaggttcagctttgtccttatttttcagtcaaaggaaagccatagacaccaatgtattccaggagggcttgactccatcctagattcttcccatagcagttcttgaatgcatggctgcacgtgcacctctccccatttttggggtccttcattggggtcaggatgaatgaagacatcaagctcactttgaagagcaagattctgatttggacaggttcatccttctgctcatcacttgttccccttcaattgataccctctcgttgttgggttctgagaatttgaaaccttgctctgaattgaacatgaaaaagggccgtgtagccaacatcagggacagcagtgcttttctcagtgtgagtcttttaaaacttgccttacaggtaagcatctgtctgtctttatcgatagataaggaggctcttttggctataaacctttatagttttcctgttatcactctgaggaattattgctttatgagagagtactctctcaagaggaaaagaaagtcctagtttctggtcatagctacgaattaaatttatattcacgtctgttcagctctctgaagttgttataggtattttggacaagaactaaagttagctaaagtttccacataaccatcaaagctgttatgaaaaagggaagaaggatggaccaggcagtaaggaggtcattaaatcgtccagagcttttcactaaaattggcagttccagtgtccagcctaaatggcttgaatgtatttttctctcttctggtctcagcgaacatgcttgtcagctagtagttataacagattgatgggtgaggcaaaatacgcgaaagttctttttggttacataaatactgcattaggactaagtgcagttgaagttacaatattattaattaatccctcccttttaaatttatatctttgtgaagcataggttagcaaatgcctttaaaaaatatatttcctttaggtcttaatgatctattcttttggatagtctatttcacctgaatggattgttgcttacaaattaaatatgtatcaggggctcccaatcctgaaagtcacctgaatttcctggatctctgctagaaatcaaccttttaagagataaaggagggtttatcctaaaagtactagttacttctgaaattcatgtcattactattgcttttggagatataaataacaacaaaacttttttttcttactactataaaacatcatggacttattggctctatagatacagcccaggtaagatttaacattttaaaaaattctattctgtcatctctaatatgtttcccaattgtttcaggaccaggacgcccctacagggccatagatttctcacatcaaggacctgcatttgttacctggcaccggtaccatttgttgtgtctggaaagagatctccaggtaggtcaaaactatgcatttagttcttttaattttttaaaaaatttattgtatatatttaaggcatacagtgtgaattttgatatacttatcttgatactcatacaagataagtgattagtgcactaaagtaaattaacatactcagcatcacatagagatatctctttttgtgtgtgtgtggtaagagtacctaaggtctactctcttggcaaatcaccagtacacaatacaacgttaactatagtctcagacctcgagttatttatcctacataactgcaactttgcacctttcagcctacatcttcccatttctcccagtcccttgtaactactatgtaactctctatgtattcactctttttcttttttcttcttttctttagattccacatataagtgagatagtgcagtgtttttctttctgtatctgtcttatttcagttggcacaatgtcttctagattcattcacattttgcaaatggcagggtctcctttttaaaggctgaataatactccattgtacacagtatatatatatatatatatatatatatatatatatatatatatatatatatatataaaatatacacacactgatttatgtcacagtttcttcattcatttatccatccagtagtctttgtcttggtagatatttggttcagatacatatcagcctttgccttgtatgctttcttgttgtatctgatggcatggattaaatgactaggcctgccctttgcttttagcgactcattggcaatgagtcttttgctttgccctactggaactttgccactgggaggaacgagtgtgatgtgtgtacagaccagctgtttggggcagcgagaccagacgatccgactctgattagtcggaactcaagattctccagctgggaaactgtctgtgataggtaatggctcctgtacctgcaatggcatccagagattgtcttttctgatgtctgagacatggaggagaagtcactttatagtgctgtttcttatgcatgtggtgtcctatttacatgtttctaaaaacagttttcctctgggaggtgggatttcaaaaattcaaagctctttaattaaaaaaaaaatatcaaaatcacatttgtgaattggttatgcttggccatcattttgagatcaggttagttttatcagattagtgcaaatgtaattgcggtttttgcctttaaaagtaatagcaaaaaccacaatttcttttgcatcaacctaatcaaattaagagtagttcttgcattcaatcaacatttgctaagcaccaatcatatcccatgtgatgtggtactgccgggaatacaaagatgaatgaaataaaacctcccttttgaatattgtcttgtattaacgagatagatttcttgtaagtaaattacagttgagtgtgggaagtactgtaatagatgtatacacaaagacaagaagagagtctgggcaagtccccaagaggcagagatgatggctctgagaaggggaggggcacagacctgaggtgtagaggagggtgaggggagtgtgggagggcagtgggtgggtccttgatggaggaacatcatgtgtgaagctagataattctctggaaacagcctggtatggctgagtcacaggatgctggtgagttgaggaggacaggggcttggggccagccggggaaggatgatctgtgacatactaaagaccatacacaggtcagtggcctggcctgcagcccatgaagagttctgtcctcaaaggctccttgaatttgtttctctgtcctggaacacctggaacacatttcagccaaaaatttcccaagaggctcctcacctcaccttcctttattcatttttttcctccaaaatttgttttgttttttgttttttgtttttttgtttttttgagatggagtctcactctgtcaccaggctggagtgcagtgacgtgatctcggctcactgcaacctccgactccctggttcaagcaattctcctgcctcagcctcctgagtagccgggattacaggcatgcgcaaccacgcccagctaatttttgtatttttagtagagacagggtttcaccatgtttgccaggatggtctcgatctcctgacctcacgtaatctgcctgccttggcctcccaaagtgctgagattacaagtgtaagccacctcacccggcctcaaaatccccatgtttttaaccccactgctctgtctttcgtcccaggtccttagactgctccagggcacagagctgtggctcccccggcccccaggcttcactgccaacaccctgagcctgcataggtgtgcgttttgaggggcccatgcccagctagcagggacttcgtcttccacatcctgtacatttcctacagtgctcagaacagtgctccacgagcagggacatcatcagtgctttttctgtgactgagcttaattccatcaagcgccatttcccaccataccttggaatagtagtggatggtatgtgaaaagagatttccgtcatcaagtaaatttagagaaggctgagtttaaaaggtttttaaatttttagaatgtcgtcaagctttccatagataaatgtggtattctttttcaagaggagcctaaccctggaactcttacttcaccggacatcccattggaatccactttgggaaacgctgcctgggaggccttggagacctttttcagcttagtgtttaggtcctggcctctttcatccctgtggatgtgctgattatattctcacatactgggtcctatccctaattcatgaaaaccctcacaataacatctttaaatttttatctctgccagtgaaataatggtctgcactttgggagaccaaggcagggggatcacttgaggccaggacttcgagaccagcctgagtaacatagtgaaaccctgtctctacaaaaagtttgaaaagttagcctagctgggcacggtggctcacgcctgtaatctcagcactttgggaggccgagacaggtggatcacctgaggtcaggagttcgagaccagcctgaccaacatggtgaccaaccagcctgacagctctgtctctactaaaaatacaaaagttagctgggcttggtggcatgtgcctgtagtcccagctactcaggaggctgaggtaggagaattgcttgaactcaggaggtggaggttgcagtgtgccattgtactccagcctgggctacagagtgagactctgtctcaaaaaaaaaaaaaaaaaaagttagccagtagtcccagctactggggagactgaggcaggaggattgcttgagcccaggagttcaaggctgcagtcagctgtgatcatgccactgcactctagcctgtacaacagagtgagaccctatctctaaattaaaaaagaaaaactaaataaaaagaaagaaagaaatactattctgatgttggaatccaggccatagcaggcgtgtaggatataatgtcttacggacatgggaccttctcagcccatgctgagcacttaactattgatactctactaccttggaacattttccaacacagtgtttcttctaatatctcccctttgtgtactttcatctgcttttactctgacctccccgtttgccttcagtttgcctaaaaggttttcgtaactttacatgtcacttctgccaaaactggcttagctcagcataatacgaaccaccctattctcccttcagttactcaagattcaaatgcacacaataggagtcatcttgccttgtaaaccctctcactgtctttccaacagaatggtaatgattattcatatttatgcccatgtccgtattttgtgcatctacatttttgaaacttctcgacccataatgactttcaggtatagtactttttaccacatattgttaactctggtaaagtaattgtaatacaattttaccatgattgtgaccctgattgatttgcttggcccaaatttataatactgtacataagttaagacatatcattttttgttttgggggattttttttttttcttgagacagggtctcactctgtcactaaggctggagggcagtggcatgatctctgctcactgcagcctctgtctcctgggttcaagcgattctcctgccttagcctcctgagtagctgggacaacaggcacacaccaccaagcctagctaatttttgtatttttagtagagccggggctttgccatagctggtctcaaactcctggcctcaagggatccacctgcctcaacctcccaaagtgctgggattacagacgtgagccactgtgcccagccaacatatattattttaaatcttattacaaatcttagcttggatgactacaaccacctggtcaccttgtgcaatggaacctatgaaggtttgctgagaagaaatcaaatgggaagaaacagcatgaaattgccaaccttaaaagacatacgagattgcctgtctctccagaagtttgacaatcctcccttcttccagaactctaccttcagtttcaggtgggtgctctgagctctgctggacctgcctgtacagtacaggttttcatgcctgtgattgtaaagaactggaaggaaacccaggttttgggggttgtctacgaagctaagtgatggagagaggcctaacgagagaagttagcaagggattggtgtgaggaaagtctttacccatctactatgactaacaatgtggttttaataccttctaacttagctgttcaaaaccaacttttgtatttctaattgcagtacattaataggtccagtctttggaaacagggtacttcattaaatatagtgttttttcaatgtccatgctctttctctttcctttcttattttttaaaatgtcgatattagaaatttatcagccatagaacttaatagtgaggtctgagatctcagaggagtattgcagactaaattcaactcaaatcatagcacagcaatgacattacaatacttaacatttaaagaccaactattaatcttccaccacaggttgggcatggtgttcatgcctgtaatcctagtgctttgggaggccagtgcgggaggactgcttgagtccaggagtttgagaccacctgggcaacagagcaagaccctgtctctacaaaaaaatataaaaaagtagccaggtgtggtggtatgtacctgtagaggtaggcctagaatttaagcacatctcaaaatcaccaaagaaaaacacatgtttcatgccctgctcccagagtttctggttcagtaggtgtaggctgtgtcttaacaacttgcatttctaaccaaatcccaaatgatgccagttaaggtggtctgagcactgcattttgagaacaactcccctaactcaaacatatagaaaatgcaatctgttttaatagcacttttgtcacaatgaaaaactaattcatcctccttttcaaaacaaccttaaatgttacccttcccccacctttgacactactctgaaggctgtgtccaacctcagcagactgagccatgctacacttagcacaacctctacatttgagtccagcctgccctgccctgggcccatacaaattgtctactttaaacacagttaagagagagagagaatccagttttggagaagatctttaatctatctaccatcccctttttggacccatctttgtttaaagtcttatttataaacatatttctcataattcttaaagtctttctatggtggtagaaaatttttttcttttttcttttttttagagccaggatctcactgtgtcacctagggtagagtgcagtggcacaatcatggctaattgtaacctcaaactcctgggctcaagtgatcctcctacctcagcctcctgagtagctggaccttcagtcaagctgaaggtctatttggttgagaaatataaatatcagattatatgttaaataaaagaatttactgatcacagacaatctgctgggcatggtactgaaccctggcaataaatatctgaagaaaacatagagcctgctctccaagggaatgagagacagatatgaaagttgtcatacagtacacaaaagagatataattcagaaatagcgttgcttaggagttctctccccttacagaggattatcattaaagtttggggcaaattcttggtcaatttgctatgacagagcttcccatatccctacccaatctcaaattagacaactattatctaggctgaaaacaacaaaaaagagacctttatcagtctttgtctgttgtcactgatatacttgtttctcctaggaatgctttggaagggtttgataaagcagatgggactctggattctcaagtgatgagccttcataatttggttcattccttcctgaacgggacaaacgctttgccacattcagccgccaatgatcccatttttgtggtatgttcaaagattcagaatgcatgaaaattttctagataatatgtcagatttattttttcatacaattaatgtttgatggtgttttattctctgtgtgaacaatgtgatgtgtgcaaatgtaaattaatttcaatctataccatagggatggttaggtagcatttgaaggccctaatcagaacccatgcttcagggatggttcacttttgggtgatcttagacaagagtttacaattccactggtgaattcataaattagcataataataaatgatttttcattggctaagtgagtattgttgaggttcagtagtccacacaaaccaccttcaatgtgttacctgcaggaaagagaggttctgttagccagaaaaggggaggagaatggagagggtgtgctggacacttaaacctcctactccaacttgagtgagctttacttgagaaagaagaaaagcagcacctgacatccaagagctggcctggtgaaatcaaccaggccttggtgtcccctgttggacataaacaatctcctagaacatcaacagcagacaaggccactctgatcatggtggatcaggacaaaaacaagactactccataactgtgtctaagcacagacaaattatgaacattttccaagccacaagatgcatgacatcccctttcctggctaataggagcaaaaaatgacaaatgccttcaccgatggcattaatacaaaaactcacatttgaggcaatttaatttgttaatctgattcatacctctgacatgtaataatacagacagtaaataggattgctgttgactgtgcaggagcctcacagttatttaaatttcagtgtgatgaactcctttggtatatcagtttgatttctgtctcactttaaaacaaaagaagaaaactgccaggcatggtggctcatgactgtaatctcagcactttgggaggctgaggtgggaggatcacttgtgcctaggagttcaagaccagcctgggcaacattatgagaccttttctctaccaaaaacctttacaaattagctgggcatggtagcatgcacctgtggttccagctacttgggaggctgtggtgggaggatcacttgagcctgggaggtcgaggctgcagtgagccatgatcgtgccactgcatcccagcctgtgcaacagggtgagaccctgtttcaaaaacaaaaacaaactgaacaaaacttgacaataggattctaaattttacaattctgagcttttttagtgtttgtttatttgtttgtttttggagacagagtcttgctccactgcccaggctggagtgcagtggtgctatctgggctcactgcaacctctgcctcctgggttcaagtgattcttctgcctcagcctcccaagtagctgggactacagttgcacgccaccacgcccggttaatttttatatttttactagagacaaggtttcaccatattggccagactggtctcaaacacctgacctcctgatctgcccacctcagcctcccaaagtcctgggattacaggcgtgaaccactgggcccagtctttagtttttaaagtatattcatcccctggtgaacttttctaagacaaacaaaatggggaaatacgagtcagggctacactgttcagctaccctagtcaatgctcttcagtctgtgacctctaggaacacaatgtagttgaatacattggtctgttactccttgcaggcagagaatggaggactgtggaaagtctcagccagtgggtgttggaaaagacagaaagggtttgggcttgtgctaggtgatttggggaggacttttggaagctttgctctgaatcagatgttgtcaggaagcaggggtatgcttcctgattctatgagtgggtatcttgatagagtgattatgtctgtatatggggcagactagactgaggttaaagccataattggtaaaacagcagcagatgctcatattagccgggaaagggggtgtcacgcatcttgcatcttggacaatgttcataatttgtctgtgctcagacacggttatggggttttcttgtttttgtcctgatccgtcatggtcacagagtggccttgtctgctgtcgatgttctacgaaatcgtttatgtctgatagggggacatcaagtcctcgttgatagcgccaggccagctcttgaatgtcaggggctgcttttctaagtacaggtcactcaagttgtcataagagatttagacaacatacacattcatgtctcagcagccaatccccaaaagtgctcctgctttacagatacgcaactcaccctcgtctattttaaccctgtctgtgtgtcttctgagttgtatgtcttgaatagatagttttggagcaattacaagaagaaatttcacctcttctccttttttattttgccagtattttgagtttatattgttatccagttagattgtgtgatatccaaagactctctgtttttctccagaattttcctcaccttaatgttaatcttagcaatgtgtcttagtctgctcaggctgccataatgaaagaccacagattggatggcttaaacaacagaaatttatatcccacagttctagaggccaggaggtctaagaccaaggtgccagctgatttggttcctggtgaagactctcttcctgagccttctagctgcatcctcatatagtggagggagagagagaataaactctctgatgcctccttttatgataacactaatccagggccctatggttctgacctcattaaaccttaattacctctttctaggctctatctccaagtatagtcacattgtgggttagggcttcaacacacagattttggggaaacacagttcagtccagatatagcatttataatgcattgtcaaaccatcagtttatagaagtttgtttttcttttcttttttctttttgagacggagtctctctctgtcatccaggctgaaatgcagtggtgcaattttgacccactgcaacctccgcctcctgcgttcaagtgattctcctgcctcagcctcccgagtagctgggattacaggcacgtgccactgcgcctggctaatgtttgtattttgagtagagacaaggttttgccatgttggccaggctggtcttgaactcatgacctcaagtgatcctcgggcctcggcctctcaaagtgctgagattataggcgtgagccaatgcacccagccagaagtttgtttttctggactttttggaggcttcatgactgattacaagtcaatcagttttacttgatacagaccagggcaatcttgggaatgtaattgaaccacatggagcttctgcttcccactctgcaaagtgtgggtctcttgacctgatctggtggtgaaaatgttgttctcagtgaagtgactcttagtagattaggacaataggaaactggtctagagcccgtcaagtacaatacaaatgttatcataacaataataatgtgttttataatggtcagaattagagaaccatatgttaggtttagattttcaaaccttaattaatatttcttatcttgttctccaaagcagacagtaatgccctaagacattttactaataagcacaaagtcagaagtatttcacaggtgatttattattgttactcaacccagggtacaaaaaaaggagctatgaagagggagagtaaaggtatagctttcaatgattctaagcttgcctgatgggtgtgaagtagctttctggggctcctagatagattaaagcatagtcaggtgagcttcaagaaatcctgagacggaattagttggtagagttgttctttccttctaaaaaatgtttctttcctcatatttgcatagtagcaataaatgaaggggttgtcagaagtctgaattaatggtcccagcctctaacaaggtgggggcttatctgtgacgccgccacagcgatctttgcttttctctagaatgcctgctttgttcaatgattttaacttgatagttcacatcattttttctggctatcgtctcagccatagcttatgccaagcatttctggtgtctgctttctcagccatgtatctgtacatctatttatactatacgtctctaagtatttattaaagcatacattgtcaactgtacaatttatacacacaattcatattcataaggaaaaatgtcataatactccttatccagtactccaatatgttataagtagaacagtggaatcctctgataaattaaggattataccccaactctttctctcctattaaaaatgatgctagtaatttgattttctgcatcccaagtctccaggattgctaaaccgtatctccttcttttgaacaagcctgctaagtggacagaaattggcaacatttttctgtaaatagccaggtagcaaatattctgggctttggaggccagatgttttctgttgtaactactgaactctgcccctgtatcatgaaatcagccatagatcatgcataaacaaatgaatgtggtgttccaataaaacgttatttacaaaaacaggttgtaggctctatttggccctcaggctttaatttatcaacctgtggtgtaaaggattcacttttcttctttgtattagtttgtagtaaggatagtaggaatctctctctctctctctctctctctctctctaagagacagtctctctctgttgcccaggctgaaatgcagtggcataatcatagctcacggcagcctcaaacttctgggctcaagtgatcctcctgcctcagcctcccaagtagctaggactatagccacataccaccatgctcagctttttaaattttttatttttgtagagatgaggtcttactatgttgcctaggctggtctcagaactcctagcctcaagcaatcctcccaccttggcctcccaaagcactgggtgagtcaccatatctggcctgtagtagggatttccctttagtcatatttctccttctgctttagggtggaagctcacattgtgacttgatgggtgagaaatcccgtggttcagagatataagacatttaatcatctttgtgttcgttgtttctaatgtgcttaatgttaaaattttatttttctttagtagtatgtgtaatatacatataaataaacaaaaagccacagcgtttctttaaaggcacagaatgaataatgttttgggcctagttccagaactcaccattactttaggctattttcaaagagttttatgctgaagccaattcagccttaaatgatttttcacatattgagatccaggttaaagtatttcagttaacagagttatagcttctggaatttcaaattcatgaggcaattcatgcaaatatattgcacatgacatttattaaaattttttttgtgaaatctctccaagcaatagagctacaaaattgtatgtgatcacaataatgagcaaaagaaggcagaacattaaagtgcaggaaaaactctgaagcaatctctagtaattcctaaggtaattgaggcaaatgcacacatttatcatggaaaataagattaggccagagaaatgctaagtgctgtcttcaatattaaatttagatataatccagaaaagagaaaaaaaaggaaaccaacagactgtaaagttatttaaatgccaagaaagaaactgtgttacatagtggtaatttccttcccaattcctaaagatactattcttaagagtatacttggatgttatccttttagaaagtacatttggtgagttctacgttccttcaattcatcagtggctggggggtccataggttccataattaatactaaacagctcgtgcctgttttctaccttgtacgttgacattctaaatggaatacaacatacagtagtcttattactaatcagtgtataaaataagttcattaatttagaaaatgtgcagcaggagaaaatgaatttctaaaaccacacatagctgatggactaccataaattaaccctgtaagaaagagcccttctgagtctgctgttctaggctacaacaaagttagtgaaatcaaaagctcacaattacaggtataaataattctgagttagagtgagtttagttgaaatttaaaaaaagaaggataggtgtatcagtctgttttcatgctgctgataaagatgtatctgagactgagtaatttatagagaaaaagaggtttaatggacttacagttctatgtggctggggagacctcacgatcatggtggaaggtgaaaagcacatcttacatggtggcagccaagagagaacttgtgcaggaaaactctcatttataaaaccatcagatctcatgagacttattcactatcataagaacagcatgggaaagacccacccccatgattcaattacatcccttccacaacatgtgggaactgtgggagctacaattcaagatgagatttgggtgggaacacagctaaaccatatcaatagggcattgcttttttcttcccaagagtgaaacatttaaagatagatccattttgctttactttaaataagaaaaatcataattagactaatattgtaaaaaaataaaataacattgttgtatgtgaaatttttatttttattggtttatgatttttatattatttataattacagaaatgttggtgaaaatagtttttaaatgcctgtaattccatctcaatttttttgtttatttcttttcatattctcatatgttttatacagttgcaattatagtcatccctcaatatcttgagggaattagttccaggaccccccaccatgggtaccaaaatctgtgactactcaagtcccttatataaaatggcattatatttgcatataaggtacgcacatccttctgtatactctaaatcatgtctagattacttataattggattcagaggaccatctctataaggcacctattatgtataatatcccattatcacttaatttatttaatttttaggttgttgcatagttttctaaattttttcatcttaaaatcttagtgcacataaaagattcaaaatataaaatgtataaaatgaagtccgtattatcactaccatcttccagcaaacaatacaatttttttctaattttccagatatattttataaatacacaaacaaatatgtttatatatttatctacatggtagcatattatagacccctctgtccctttgcctttcccccactttttttttaacttattccaaatcatttcagttctgaagggcattcttattctttttttatagctgtatagtattcttttgcatggatttatcctgaaatgtattattttaattttaaatttaagattttaaactattttctgttgatggacatttaggtgatttctaatcgtttgctttacaatgctacaacaaacatccttgaacatgtaaggtaagtaaagagaatagaatccctggcttaaagggtaaaaaaatgcatttgaaatttgataaatgttacagaattgcctctagaagtttggacaatattccctcctaatacctgtgtgtcacctatgtgtcagagccacagttcccccatcattccctctcattatgctctttgtccctgtgtcatcacactttttcatctttgtcaacgtgataggtgaaaaggcattttagcaaattttaatttgcatttctcttcttataagtgaagtctaggccagatgcagtggctcacgcctgtaatcccagcactttgggaggctgaggtgggtgggttacctgaggtcaggagttcaagaccagcctggccaacatggtgaaaccttgtctctactaaaaatacaaaaattagccgggtgtggtgttaggcacctgtagtctcagctgcttgggaggctgaggcaggagaatcacttgaacccgggaggtggaggttgcagtgagccaagatcgtgccatcgcactccagcctgggtgacaagagcgaaactctgtctcaaaaaaaaaagtgaagtccagcatcttttcagacattcaaaaagaaaaaatccatttgcacctccttttctgtgatctgtcttcataacttttgtttgtgatcatgacttctggaaaaagaaaaaaaaaaccctaaatattcaaaaaagtcagaattagggaaagtaattcgtcctctgtgtgagtaacaaaatacaacattttcttttaatattttattttcctggaaaacctaataatctggtcatgtaaagatgtattttgtaggttttattagtttatggaaaatgaatgtgatcactgaaaacatactcaacctctagaacagtacctgacacttagtagatgttctgtacatttttgtgaggagaatgtcctattattgtacatctattctgtgatggcccctatgcgagatgtcttgcaaagctcacctcttaaatgaacaaatctgtatatagtaaactactctccttgttttaaacacagggaaaatacagtttagagaggctaagaaatgtgtcaaggtcacaccaatcagtaaatggctgagcagagatttataagaaaagtttcctattcaaaaatctccccgtgttcaatctttcaactacaattttgccttttgtcagtttagacaattcttaactcagtctcttcacaattgcattcactatagctgaggaaattaagtcccgttagatcatattaataggaattaacactaattggtgaagggcagatctgactaattttgcacagcttttgaaatgatagtcattgctttcattgtgagcatgtatttatgctttttaaatgtcacatttacttattcaatactagtttttaaatagcaggtacacagttactacctcctaagtggcataacatcttgatgagttttataagagctgaggaatcagagagggtggctggacccctctctggttccccagggtggcagtgtttctatggactaggctgggggctggcttgttttctttaatttcacaggtgctaaatgtcacctgaatggattctcttcaactctagaatttataaggataaatgcatactatattgagaagaactaaacctatgaattacatccaattcattctgataaaatatgaatataataacaaaccacaacttacatacaaatctaagatggttctagcattgagttgagcaactctctcctagagttttcatgattgtttagtcaagaatggcctgagaggtagcttagtctctgtctagaatctcttctagcatcaccttggttctttctccaatccgtaatgtcaacttatgatgcatgttgaactggtcacttcttttaaagttgacctagcagagtctttctgtagtcctctgcatctgttcagagtttaattcttgaagaagaagctttttttcctcaagggtttagaatcagcatttctaattctctcgatttttttttgtatgtgtgctgttagagcttgtatacaatgtatattgtgtacatttttacacacatatagtatacaaggctattatacaagtctatgtgggagaatgtgttcctgatataactcctccaaaatgcctgagaaatactctctgttttgcctgcccagggtgctataaaagaatggatagggaaatatagggagagaaaattatagcaccatccttgctgcgccctgcctggaagatgctattattgctccaatatctttttttttctcttccgtggttgtgtcctagtccattcaggctgctaaaacaaaaataccagagactgggtggcctaaacaacatttatttctcacagttctggaggctgagaagttgaagatcaaggcattagcagattcagcgtgtggtgaggaacttcttcctggctcataacggccattttcttgcttgtcctcacgtagctgaaagggaggagctctctgggtctctttggtaagggcactaattccattcatgagaaccccatccttatggcttaattatttcccaaaggccccatttcctattaccatcacactgggagttaggatttcaaaatatgaatttgttcggggtagggcacacacattgagtccataggagattgtttctcatcagtcactgaaatattctctctgtgtagtacccacctccttgtggcagagcttagttaattaaataaaggcttgggtgttgtttaactatttcatgcctattacatatggcctatttagggcagtgtgaaaccagcatcccaattacatttgttttcaaatctttggtagaacaagacaagatatttccctaaaatagcaagcctgatgaaatatattttttaggaatgaccattaggaattctctcatttaaaaagtccaaaccaaccttttaatgtataccttctactttaagttttaaattagagttcccatatggacctgtgtgtgcttttatctgtcatgtggcttttaagtgatcacatttgaattgtcacttagttctgactctcagaggaccagagcaatagcatgtcaccacaataggatccagtctgatgacaaaggatgccttctgggcagtaacacatgaactcaagtggtgaaagctacactgtgctggtctttaatgatgcacacacatctttgcagccggcctcatatttccatggttctttctctagatgcagaaacttttcttatttcatctgtgtggtgggaatccaaatttatagtcatttaagctaaggccctttgatagtaactttatcctccaatgatcttgaaaaaataatgcacactttcttgtattttattttctttatgcctgcaggtgcaatatttgttggttgattactttctcctgcatgggttacatgaaaaatctttaccttgaaagcccatgtaatcacatttttttttccattatggcctctactttgaaatttagtgttgttttttttttccttttctgtacctatcctcattttgttggaacaagacagaataggtttatatgccaaaattcggaacctcatttctgaagtactcagtttctaataccaaaacgtagctatgtagccctcgagcagatgaaaggcaccaatgatacaaatttatttatttattattattattttttttttgagatggagtctcactctgtggtccaggctggagtgcagtggtgcgttcttggctcattgcagcctccacctcccgagttcaagtgactctcctgcctcagcctcccgaatagctgggatcacaggtgcacgccaccacacccagctaatgttttgtatttttagtagagatggggtttcaccatattggctaggctggtctcgaactcctgacctcgggtgatcctcccacctcagtctcacaaagtgctgggattacaggtgtgggccaccatgcccagcccaatgatacactttcatttaacttttgcttttgtttcctaccctcaaatgacatttgaccctttacagagatattaacttgtatttaacatttttaacttgtatttaacaaagatacaattagtttttcaagagcaattcaaggtaccttattgaggaataatgcccacaattttaacaaaactacctattccgtagattgtactacttctctttttagcttgtagatatgttattgcttgtagcattttgttcattggatgctttgcattttctcagcatgtaccagtcttttcaaaaaaacttacattctataatttgggtactctgtatatagttcttactagagctttgttgttgttgttgttgttgttgttgagacagtatctcgctctgtcactcaggctggagtgcagtggcacaatcatagctcactgcagccttgacttccagggctcaaatgatcctcgcatctcagcctcaagtagctgggaccacaggcacacactatcacacctagctaatttttaaatttttgtagaaatggggtctcactctgttgctggggctggtctcgaactcctgggctcatgtgatcctcttgcctcagcttcccaaagtgctgggattacaggcatgagccactgtgtgcagccttactagagcatttattgtatgttttatagccctcctgagagctacaatttcaattcctccttattattttcccctattcttttatctctccagattactaattgccttaggatcttgccttctcctttattatttacatttttcccttggtgaattctgatactttctataagttatttgcctcttacagcactgattctgcatcttccttgtgtcctgatagtctcttgtctctttctgtcatcacaatttgaaccctgacttgaactcagacagtatctaaaagttcatgattggtttaggactcataggtcaaagtatcctctttctgcattgttaagattggagaatatgccttcaaaatcaatttttcttattctagttggtcctgaaggttgtactacagtgtggtggtgtaaagcaggggtccccaacccctgggccatgggcccatgctggtctgtggcctcttaggaactgggccacacagcaggtggatggtaagcaattgagcattatcacttgagctccgcctcctgtcagatcagcagcattagattctcataagagtgcaaaccctatcatgaactgcacctgagagggccctaggttgcacactccttatgagaatctaactaatgtctgataatccaaggtggaacaatttcatcctgaaaccatctcccttcccatccaccaccccctggtccgtgaaaattgtcttcctcgaaaaccagtccctggtgccaaaaaggttggggaccggtggtgtagaggaagtagagtatgtggattaggaactctcactttagaaccagacttcctgggttcaaattcttactctaccatatattagctgtgtgaccttaggcaagtcacttaacacttttgtgccttttattccccatctgtaaaacagggtaataatgttatgggttgaattgtcccccacaaaattcatatgtcaaagtcctaatagctaataactcagaatgtcaccttgtttggaaataggatagctgcagatatagtttattaacataaaatgtcatactggagtagagtaggtccctaatctagtgtgagtggtgtccctataaaaagggaaaatttggacataggcacctgcacacagggagaacactgcatgaggatgaagatagagatctacaaggcaaggaatgccaaagattgtcagcaaggcccgagaaggtaggagtgaggtctggaacagattttccctcacagtgcttagaaggaaccagccccactgacatcttggtgttggacttccagctgcctagaagcgagacactgtctccaaccgtaagacaaatgcctgttgtctaagccacccagtctgtagtactttgttacagcagcctgagcaaacaaataatatccaccaaatcaggctgctttgaggattcaatatgtcattttgggtaattgagcaaacactaataaatactcactaatttacttatcaaaaagtgctaggcatgtgccacatgcattcctaaatgcccagctcctcattggctatatgtacagtgtgtgtgatttcagaggtgcttgcaggccccacccacctgcaaaatgcgaattccatcattcttcttccataagtccttgtcccaagttaaaataataatagtactgatggtatagtcatagtgataacaaccattgaataaccatttcctacaagaaaggtgctgtgtactaggtacctaatatatattatcttccctaccttctcagtgccatgttattggtgtccactgttgaggtttacagacctctgtgatcctggatcatcagctccacaggctgtgttttattcatctcaagctgcgtcactatccccgtttcaccacctctgccttctcattctctgtctggatctcttagctaccctcccacccagggggcagcagtgtggaggagaagtctcaggcctgacattccatctgttctccttcctggaacccagagggggccaggaaaagggggtggcatctctagccccccaacactgaggaagaatggggctcttcccatttcaccccgcccccccacagtttctcccctgcctccaggaatgggccacttctgcatggggcagcgggtcccaattcagctcacactgagaatgtaagaactacaaacaaaatttctattaaattttgtgtctcaacagaaaagagaaagcgaccaaggaactcccttccctgcatgtgctggtaaccatgagcctgggaggctctactcaggtttttttcctttgttgtgtttatccatttctgcataacagattacgattacccaaacactcagtggcttgaaggtgaccatttcatttcttaccatttctgtgggtcaggaattttggaagggcttgactaggcagttctagcctagcatctttcagtgcagctgcagtcagatggtgataggtgttggaacagctgtggactggcccgctatctgtttttcttcctgaaatcttgagcctcgccatcatggtcactctatatgagttggtttgggcttcttcacagcatggctgcctcaggacagctggactgcttatttgatggttcagggctcaggcacaagataggaactgcaatacactttatgatttaaccttgaaagtcacaaaatgtcacttctgttgcattttattggttataaaagagtcagaaactcaccaagtttcaagggaaggccagatgaagccaaccttcaatgagggagtggcaagattctagaaaagcatgttagtcaagaaacaaacattgtgtggccttctttggaaaatatatttttgtatatccctagacactgtttatttgcacaaactgtttatgtaaataaagatgcatgacactgtcatcagccaacacatacttagtaaatattgactctgtccaggttgtatgctaagctttgcactgtatgcaaagtgtctgcatgacactgtcatcagcaaacacatagttagtaaacattgactctgtccaggttgtatactaaacctgagacttcaaaggtgaaaagtccttatcttagaccttaaggagttaggatcttgttaggggacatagatacataaataacaagttatagtatcatttgatcagtgctataaatgaggtacaaggtacagtggtgaatggaggaatgaatacactgaataagtatttactgaaataagtacctccctttctccatatgagacaccctggggtgacaagctctggggatccagggggaatgaaaaaaggacactgcccctgagctccttgaacttaccatccaggaaggaacaaggaactccaacaactgccatcaaggtgggactgaactctcaaacttgtatcatgttacaaaatcagggctatcaatgtggaaattttgctgttaatatttcaaaacatatagtaattgctatattttaaaaggactttaatggcttccttgagaaaacataaatgagcactttgtacattacctttttagactttcttttgctggcataacagcaagaattcaagtgagagtttatgaaatgagtagacagaagagtattcctggtgagaaaaatttactgttcctttatattataatattgatacagattgagtatcacttatctgaaatgcttgggaccagaagtgtttgggattttgaattttttcagatttcggaatacttgcattataccagttgagaatcccaaatccaaaaaattcaaaaatgctccaatgagcatttccttcaagtgtcatgttggcactcaagaagtttcaggtttagggggattttaggttttaaattttcagatttcagatactcaacctgtaaacacaactttttctttctctcctgttaaaccaaatcatctcaatactagaacatgtatcttatcatacttgcctttttctgaatttcataattaacacatatatgttgaaggcctcaaatgttcaatctgcaaccaatgttaaatccaacatgaactttcatttgctcacttgacaaaggggtttatagtcctgcttggagagagagattcatacatcgttgaaaacttaactgtttttcttcccgaaatcttgatcctcgccatcatagtcactctatatgagttgatttgggcttcctcatggtggtacacagaagggggtattccacacatgggtatacagaagttcctatgtcaagaagaagttattccactttagagaaagcaacagtcaggttggtgtgatcggaacagactgatttatgttaaatgctgtgtccaactgttttgcaggttcttcattcctttactgatgccatctttgatgagtggatgaaaagatttaatcctcctgcagatgcctggcctcaggagctggcccctattggtcacaatcggatgtacaacatggttcctttcttccctccagtgactaatgaagaactctttttaacctcagaccaacttggctacagctatgccatcgatctgccaggtaactaacacaacttccaaatgggtgattcattcatcttctaaagaagctagctttcttgctttctttctttataatgtaaaccaagacctttagccgaagctttcaggtctagttaagtttattgaccatttttctagcatatacgtatttagcaaaatgagcctttaaactaccaattaaacatcagaaagggactaatgagctgactcttgttttagaaaactgaaagttttaaatagatcttattaaatgaactatctgcttttacacctgacttgacaattctctctgagtttattggattaataaaaaacctccctatggttctttgaaatttctaaccaatgaaataaaaatgaactagccacactgtacagggactagctggatttagagattattccttgagggcagggctgggattagggtgaggaaagtacaacatttgccttgagcacaaaattcaagaggaggccagaaaactcagtaatcaaggtaagtaataatataatacaaaattttggaaagtcaaaattaatgcaaaaaattaaccatgaataatacatcatcaaaattttaaataaaggcagacttttgtttgtttttcatacccacatcgtcttataactgaatcagtcatttcccatttagcctataccacctgcgatggataggttcatgaaggctgacattgattggtctaccaacagattgggctacgtgggactctatgtgtatgttgcattagttactgtttttaaagtcatgttttaagattgtagatttcttattaacttttcccacttggttcaacatatgggaggatattttgacaagtatatacagggcacatgtttttctttttggcccaggccccaatatggctccacacaccatttaaagaatgttaggagcctggcaacatactgagacctatctctgctaaaattcaaataatattagctgggcatagtggtgcatgcctgtagtctcagccactcgggaggctgaggtggaagaatcgcttgagcccaggatgtagaggctacagtgagccctgtttgtgccactgcactccagtctgggcaacagagtgagaccctgtttcaaaaaaacccaaaaaaacaaaaacaaaacaatttaaaaaatcttaatcaagaaggtgaaaaatcacacagcctatttacccaaagtctcagcctagaaagcaatcaagatgatttcagagctcagtctctctctctttgacctgagtctttcaagcctggctgtagtgggacgcttgggcagagaattacctcgaattaagttcaaatttatgaaagagcctaggtacagagggccttagatgccaggcagaaaccccaataagataccacctcatacccattgggatgactgctatcaaaaaaaaatagaaaatagtaagtgttgctgagggtgtagagaaattggaatccttgtgcattgctggtgggaatgtaaaatggtgcagccactatggaaaacagtatggggattcctcaaaaaaatggaacaaataattaccatatgacccagcaattatacttctggtatacctaaaagaactgaaagcaaggtccagcagagatatttgcacacccatgttcatagcagcattacttacaatagccaaaaggtagatgcaaaccaagtgtctgttagtggatgaatgaataaacaaaatgtggtacatacatacagtggaatattattcagcctcaaaaaggaaggagattctgatacatgccacaacatggatgaactttgaggacactaagctaagtttaataagccagacataagaacaaatactgcatgactccacttagactatgagatagtcaaattcatagagacccctggttaccaggggttgggaggggagaatagggagttactgtttggtgggcacaatgtatcagttttgcaagatataaaggttctgagaatggatggtggcgatggtcgcacaacaatgtgaatgtacttaatgccactgcactgcctatttaaaaatggtcaaggtggtcaaatttatgttacatatatgttacaacaatttctaaaacataattttttaaaaaactaagaggatttggacaaaagcaaaaggcaaccattttttggtcttgaacaaagaaatggcagaataaaaatatatgtgttttaagaagatgaagttggcaataggtgctgctgggttgaatcaggaggagacagatcaaaaccctcttggaggaatcccatcaggacaggtcaggacctcccatgggattgcagaaaaaggactagaaagagaatcttatattaggtgagtgtaaggtatagaacaaattcagaggagctgaatttaagaacagttggccaaggagaatataatttttaaaataaatgaaaaataggcatatgtatattaaaaatgaaattcggccaggtgcagtagctcacacctgtaatcccagcactttgggaggccgaggcaggtggattccctgcagtcaggagtttcagaccagcctggccaacatggcgaaaccctgtctctactaaaaatacaaaatttatctgagcatggtgatgggtgcctgtaatcccagctactcgggaggctgaggcaggagaatcgcttgaactcaggaggcagaggttgcagtgagccgagatcatgccactgtactccagcctgggcgacagagcgagactttatctaaaaaaaaaaaaaaaaaaaaaaaccaaaaaatgaaatccactaattttgtggaagagagcttataaaatatatgagagtagaagattggatttatcatgtgggagatttacattttattcacaactatttgaatgggtataaatatcatctgcttggttattgagtgtctcctggtgtaatagccagtctgatccctctcacaggtttatcattctataaaaaaggtagagacaatagcagaatttctcttcccaagggctgtatattttgcagctccccagatgccattttagcatgcactttcacaaatgagtttctaactcagaaaagtagttacattcttccttagaaggtttcttcggcataagcatttattgtaacaaatttttaaaatgcaataagctgtatttaagtaatgggatgccagttctgactaccccaagaaaaacaattgtggatatgataaatggtgagaaaggagaagataaattttagtctagcatgagtagttttgctttatcaacaaaaagcacgtgaaaggcaagtgcgcttgctctttttctcttctgaaagtattcagctgatgaaaatcctgattgtagacccttctcttctgctttagtttcagttgaagaaactccaggttggcccacaactctcttagtagtcatgggaacactggtggctttggttggtctttttgtgctgttggcttttcttcaatatagaagacttcgaaaaggatatacacccctaatggagacacatttaagcagcaagagatacacagaagaagcctagggtgctcatgccttacctaagagaagaggctggccaagccacagttctgacgctgacaataaaggaactaatcctcactgttccttcttgagttgaagatctttgacataggttcttctatagtgatgatgatctcattcagaagatgcttagctgtagtttccgctttgcttgcttgtttaacaaacccaactaaagtgcttgaggctacctctaccttcaaataaagatagacctgacaatttgtgatatctaataataaccccccccccaatattgattaagcctcctccttttctgaaagcatttaaaaaaaaacaaaaaaaatcccaaaacattgatccaggggagtcatttaaatttgcaggtcagtgcaatgtgagacctggccaagaccatacatcaatctttcttagccccagtgtctttattggtaatgccatggaggtgggagttggtaggtgctagatgagtctccaagatcccttttagctataaacatctctgcttctaggcaccctcctgattatcttccttgggcttctttttcttcttttctctatatttttcctctccagcttagaagatgagaataagccttgttttctttacaggatggaaaatgactaaatgaaggatcaattccactctattgtgtaaactagattttacggattttacttaaaatctgcagttttaaacagtagacctatattacaggattcaatagctggatacacattgattctatagtgataaatagagaagataataaaattatagagtttcctggttagttgatatgctactgtaaacctattaacaaatacagaattactctttccaaggaaggctgactgaaggctggtgaggctgtaaacctgaacatgagacaatttgacttgagtcccattactctgaggtctctttggctgatcctctaccaatttctttactaggtagcctcagatgaaaaattattcccacataatgcactgggcttatttttaagcattgatgttagattgattaatgttgccgaatactcacagttacttatgaatgctgatcaattaagtcttatcatttgaaagcaaaccatctgtacaaaacatgacaattcagaattaagtggttatattctgctatgcaatcatcagatcatgaggaataagaatgagacaatctttactacgatgttcagacttatcatgatggaccccacttcagagaagttaatggctcttgagatttccaggcaaatttcatctgctcatatctggtttctgtgcatcaggagtgagactgaagttctagggcgtggcttgtctgtcgaggcccctctctactggaatgaatgaatgtaaagaatgggtgttaagaggtccctggagctgccttcaacataaggggtcctagagggtgcaagactcatcaagaaccagtttaccccatgcaaaaggactgctaaagccagagaaatggacaaagcccagttggaactgaatttgaatctcataaagctacaggtgcatctgagagcaggctcagtggtgaagatcaagatagcccggtaaagccctgcttgggctttttagcctcagccacatggatacctctcagttcctgccattaacaatattcatggaaaatacagcactgtgtctttcacatgctccactctggaaggtttatgctctgagctcaggatagttggggaacacatttttaaatcttggttttaaacaaaaagagaaatttattaaaatggagatataattgtgcatggtacatatatttctgaaaagttatgtataaatcaattatgttaaaagcgccagaagttactttttataagtgaactattacgaataatttcataaagcaaataaccacctctagcttatctgtcaggtatatcagaattctcatatatcatagtctcataagacttggttaaagcagatctatcttaggtaggaaaaaatagtaatcgattatacttagctgcttttatctgtagtgtgggtgactttttataactattatgttttataatgtcttcctgagagaatttcctaattttgtagttcatataagagaaatacaattttctagcattttctgaccttacaataaatcaattatgaatgcattttaacaaatattaaggtaggataaaccaacagaataaaaagttggtatttacttacattgaatatcatgcaaataaactcagaaaatgtcaccaaatactgtgggctatatttctcaatgatagggggaagaattcaaccttggagaaaatgaccagatcactttactgcttatatcttcagtattagaaaaactgcatgtatgattttaatagaaatgctttttataaagctaacattcagaaatgggataaaatgcaataacatctttcctttgtgcattaaattcccttctaattctaaaattgacatttgtatcttgcttaggatttaacattgttaattataatacttttaatgactagttttaatctcattattaagaagtagaaaacttactaaaaaggaaactaaaaataaatgttgttttgcagatta

SEQ ID NO: 32 - DNA, 43 bp, Homo sapiens
ctgggaatgtgtctaggaaaccctctagtgcttagtccacttg

SEQ ID NO: 33 - DNA, 43 bp, Homo sapiens
ctgggaatgtgtctaggaaactctctagtgcttagtccacttg

SEQ ID NO: 34 - DNA, 14394 bp, Homo sapiens
tttattctctggaacatgaaacattctgttgtgctcatatcatgcaaattatcactagtaggagagcagagagtggaaatgttccaggtataaagacccacaagataaagaagctcagagtcgttagaaacaggagcagatgtacagggtttgcctgactcacactcaaggttgcataagcaagatttcaaaattaatcctattctggagacctcaacccaatgtacaatgttcctgactggaaaagaagaactatatttttctgattttttttttcaaatctttaccattagttgccctgtatctccgccttcactttctgcaggaaactttatttcctacttctgcatgccaagtttctacctctagatctgtttggttcagttgctgagaagcctgacataccaggactgcctgagacaagccacaagctggtgagttgtaggcattttttccattactttctgattcataggctcaacgcacctcaaagctggaaatgccgggtctgggtacaccctggggaactgcaaagcctgcacacttggggggaatgatcaagatgagaggcaggggtggggatggcatgtgcaccaggagatgttagagaaaccctgaggaagagcagcgtgcagcaggtgatgggggagagtgggcagcaagcgaggccaggacagccactctgctcagtcaccagtccacacacccaggggctcactctgcccctctgagcacccaaggacgttaaagagctggaactgttagtctaaatataggaccatccaagctctgaaccaaaatgtgtcccttgcctcaactcaggagatccacagaggcagaagtaaggaatttattttctgaaagatagatttctatcagttctgggtgacatgttctgacacttgaaatgacacctaggacagcacatttcaggcatcttgctcattgttcactgtagtagaagctacatgctagccagttgtaaaaatgaaattaagtaatgtgtgcacagcatttaacatagcatctgagcttcaggagcactcaattaatgaccacagttgtgattctttaggcagatgcatttttttccaactttgatcagaggtcttatttagcttctccagatttcaagaatctggctcagtgatatgaaatacaagacttgtgaaaagtgtcaattgcaagagaaatggaaggataaagtatacaggtgggtggaaaagaaattcacagtcactgccagaaaaaaaattcttgagaatcaagtcctgatgatgttagggcttatagttcttattataaagagttttatgtactcattcagtgaacatttattggtgcctcctttagccaggtactatcataagagctgaaaatagaagcataatccagtccttgatcttgaggaacatgctgtgtgtagcagataacataataagtgcttatctagatgcatgcagtgttatgtgataagagtaatatgacagaggatacagattaggcttcacagagaagggggatttgagcaggaggtattgaagggtgaatagaagctcaccaatcattttgggcagaggggcaaggacctgcaaaaccactgaagcatgaaggaaatggtgagtttagggaaaatgaagagaagatggctgtgactgaagcacaggatttgggattggagaagggactggaggtgaggctgaaaagaggcaaactcagaaaagatgttgtgctgggcagtctggacattatctttgaagcccaccacatataagtcatagggctactggaggttttaagctaagagtgactattcaatttcaacttaagagaagataggttgagagggaacatggcttgagatgagccatgagcaaaggaaagactacaacaaagccaggagtgaggagtgtgtgaagcaagaaagtgacagttgaaagcagtgcagaggggatgaatctgagaggcatctatgaggtggaactcaaatgacatgataataatacagggcatttctctgtgtcagatgctgtcctaagtccttactccattgatcttcacagcaactcagcatagttaatattttatgcataaagaaatcggcacttgaaggagtaattggccccagattacactgcctataaggattcaaatccaggtttgtttggctccaaaaactggctcctaattttcagaaggagaagcaacccagggcaatgcccaattttgcttcttaggcaatggaggaatccacaatcggaaggagttttcagcagtgccccatttggggtgggttgaatttgaggtccctgcatgatacccactttgctcacttcagtgcctaaaactgagtatggttcatagtaggtgttcaataagtgttgatgcagtgaatacatgcatggggagatatgcatcaggcaatgggaaattcaactctaaggcttaggggaaagctggagcttgaagacagagctttagaaaacagtagcatagaagggagtaggaaccatgagtttagacaatacaattcaggaagaactttgtagcaaggataaagaggcaaaaaattaaagaggtgagagctaagtgtggtgcctggggaatcttaaggtgtgggcacggggaggagatgccagcaaagaacatgaataaaaagcggtagcacagcccctcccatctggaagccaaaaagaattgtaaatggaggaagttagcagaaggatcaaatacttgaagagggtggaattggaataaaaccagggcatttgaaaaattgggttgtcactgcaatcttaacaagagaagttttggcaggatgatggaggcagaaagctgagagaatcatcagttagaacgtttttgacttcagagaacagaaaatgcagttcataatggctttaaaacaggggcttgtttttctcccagcaatttgagaggccaaggcgggtgcatcaggaggtcaagagaccgagaccatcctggccaacatggtgaatccccatctctactaaaaatacaaaaattagcggggcatggtggtgcacgcctatagtcccatctactcaggaggctgaggcaggagaatcacttgaacccaggaggtggaggttgcagtgagctgagatcatggccactgcactatagcctggagacacagcgagactccgtctccaaaaaaaaaaaaaaaagaaggcagaaggtgaatagttcaagggtgggtttaggactcagtgataataggattctgcctggcttctcatggttctctaggtcttccattcatggcaccatgccctcactaggcatgctgccagagcaggaggggcaggtggagggttctcttgtgtctgtcttatcagggaagaagagctttctcagaagcccccagcagactcccttttcatattatggtccagcaatgagtcacagacctatgcaccacctgcaaaggagccagagaaaacaaacgcccagcgcttttagcctgaaaatgagaatctggtttgctggggaagataaagggtgtcggaaaatggctgttgggtaaatcattgatgtctgccactaggaatgaaaggcaaatcaggaactggcacacatgctttcagggagatggctgcaagggagagggcaaagactgggaagttgcttatgtggtgccagactatttggaagatcatggattgcggtgtttgtgttgtgtggtcatcattttgttctttgtttacagaacagagaaagtggattgaacaaggacgcatttccccagtacatccacaacatgctgtccacatctcgttctcggtttatcagaaataccaacgagagcggtgaagaagtcaccaccttttttgattatgattacggtgctccctgtcataaatttgacgtgaagcaaattggggcccaactcctgcctccgctctactcgctggtgttcatctttggttttgtgggcaacatgctggtcgtcctcatcttaataaactgcaaaaagctgaagtgcttgactgacatttacctgctcaacctggccatctctgatctgctttttcttattactctcccattgtgggctcactctgctgcaaatgagtgggtctttgggaatgcaatgtgcaaattattcacagggctgtatcacatcggttattttggcggaatcttcttcatcatcctcctgacaatcgatagatacctggctattgtccatgctgtgtttgctttaaaagccaggacggtcacctttggggtggtgacaagtgtgatcacctggttggtggctgtgtttgcttctgtcccaggaatcatctttactaaatgccagaaagaagattctgtttatgtctgtggcccttattttccacgaggatggaataatttccacacaataatgaggaacattttggggctggtcctgccgctgctcatcatggtcatctgctactcgggaatcctgaaaaccctgcttcggtgtcgaaacgagaagaagaggcatagggcagtgagagtcatcttcaccatcatgattgtttactttctcttctggactccctataatattgtcattctcctgaacaccttccaggaattcttcggcctgagtaactgtgaaagcaccagtcaactggaccaagccacgcaggtgacagagactcttgggatgactcactgctgcatcaatcccatcatctatgccttcgttggggagaagttcagaaggtatctctcggtgttcttccgaaagcacatcaccaagcgcttctgcaaacaatgtccagttttctacagggagacagtggatggagtgacttcaacaaacacgccttccactggggagcaggaagtctcggctggtttataaaacgaggagcagtttgattgttgtttataaagggagataacaatctgtatataacaacaaacttcaagggtttgttgaacaatagaaacctgtaaagcaggtgcccaggaacctcagggctgtgtgtactaatacagactatgtcacccaatgcatatccaacatgtgctcagggaataatccagaaaaactgtgggtagagactttgactctccagaaagctcatctcagctcctgaaaaatgcctcattaccttgtgctaatcctctttttctagtcttcataatttcttcactcaatctctgattctgtcaatgtcttgaaatcaagggccagctggaggtgaagaagagaatgtgacaggcacagatgaatgggagtgagggatagtggggtcagggctgagaggagaaggagggagacatgagcatggctgagcctggacaaagacaaaggtgagcaaagggctcacgcattcagccaggagatgatactggtccttagccccatctgccacgtgtatttaaccttgaagggttcaccaggtcagggagagtttgggaactgcaataacctgggagttttggtggagtccgatgattctcttttgcataagtgcatgacatatttttgctttattacagtttatctatggcacccatgcaccttacatttgaaatctatgaaatatcatgctccattgttcagatgcttcttaggccacatccccctgtctaaaaattcagaaaatttttgtttataaaagatgcattatctatgatatgctaatatatgtatatgcaatatatataggctcttgcttgatctctccaggaggtagtgattatgagaagggggtggagaatgatgagttccttcaccaggagcaaaggacggggatcgtgtggaaccactgcagaactatttccgaaatcaactaagtggagagagccaggaaggctgcatcagaacccagtaaagcttcttgtctggatctgagctggtttgttttgtgcttgcttttccctgccttgccactcccctcactcttctcttttccccacagcctttttcacatagctcttggctgtaggattgccccactccaaaaaccagtgtgtggaggtccaggagtgagaccaggaaagaatgtgaaagtgactacacaaggactcctcgatggtcgtggaaaaggaaagtcaattggcagagcccctgaagccagtcttcaggacaaagaaggagcctagagacagaaatgacagatctctgctttggaaatcacacgtctggcttcacagatgtgtgattcacagtgtgaatcttggtgtctacgttaccaggcaggaaggctgagaggagagagactccagctgggttggaaaacagtattttccaaactaccttccagttcctcatttttgaatacaggcatagagttcagactttttttaaatagtaaaaataaaattaaagctgaaaactgcaacttgtaaatgtggtaaagagttagtttgagttactatcatgtcaaacgtgaaaatgctgtattagtcacagagataattctagctttgagcttaagaattttgagcaggtggtatgtttgggagactgctgagtcaacccaatagttgttgattggcaggagttggaagtgtgtgatctgtgggcacattagcctatgtgcatgcagcatctaagtaatgatgtcgtttgaatcacagtatacgctccatcgctgtcatctcagctggatctccattctctcaggcttgctgccaaaagccttttgtgttttgttttgtatcattatgaagtcatgcgtttaatcacattcgagtgtttcagtgcttcgcagatgtccttgatgctcatattgttccctattttgccagtgggaactcctaaatcaagttggcttctaatcaaagcttttaaaccctattggtaaagaatggaaggtggagaagctccctgaagtaagcaaagactttcctcttagtcgagccaagttaagaatgttcttatgttgcccagtgtgtttctgatctgatgcaagcaagaaacactgggcttctagaaccaggcaacttgggaactagactcccaagctggactatggctctactttcaggccacatggctaaagaaggtttcagaaagaagtggggacagagcagaactttcaccttcatatatttgtatgatcctaatgaatgcataaaatgttaagttgatggtgatgaaatgtaaatactgtttttaacaactatgatttggaaaataaatcaatgctataactatgttgataaaagatttaaaaacaatttattctctggaacatgaaacattctgttgtgctcatatcatgcaaattatcactagtaggagagcagagagtggaaatgttccaggtataaagacccacaagataaagaagctcagagtcgttagaaacaggagcagatgtacagggtttgcctgactcacactcaaggttgcataagcaagatttcaaaattaatcctattctggagacctcaacccaatgtacaatgttcctgactggaaaagaagaactatatttttctgattttttttttcaaatctttaccattagttgccctgtatctccgccttcactttctgcaggaaactttatttcctacttctgcatgccaagtttctacctctagatctgtttggttcagttgctgagaagcctgacataccaggactgcctgagacaagccacaagctggtgagttgtaggcattttttccattactttctgattcataggctcaacgcacctcaaagctggaaatgccgggtctgggtacaccctggggaactgcaaagcctgcacacttggggggaatgatcaagatgagaggcaggggtggggatggcatgtgcaccaggagatgttagagaaaccctgaggaagagcagcgtgcagcaggtgatgggggagagtgggcagcaagcgaggccaggacagccactctgctcagtcaccagtccacacacccaggggctcactctgcccctctgagcacccaaggacgttaaagagctggaactgttagtctaaatataggaccatccaagctctgaaccaaaatgtgtcccttgcctcaactcaggagatccacagaggcagaagtaaggaatttattttctgaaagatagatttctatcagttctgggtgacatgttctgacacttgaaatgacacctaggacagcacatttcaggcatcttgctcattgttcactgtagtagaagctacatgctagccagttgtaaaaatgaaattaagtaatgtgtgcacagcatttaacatagcatctgagcttcaggagcactcaattaatgaccacagttgtgattctttaggcagatgcatttttttccaactttgatcagaggtcttatttagcttctccagatttcaagaatctggctcagtgatatgaaatacaagacttgtgaaaagtgtcaattgcaagagaaatggaaggataaagtatacaggtgggtggaaaagaaattcacagtcactgccagaaaaaaaattcttgagaatcaagtcctgatgatgttagggcttatagttcttattataaagagttttatgtactcattcagtgaacatttattggtgcctcctttagccaggtactatcataagagctgaaaatagaagcataatccagtccttgatcttgaggaacatgctgtgtgtagcagataacataataagtgcttatctagatgcatgcagtgttatgtgataagagtaatatgacagaggatacagattaggcttcacagagaagggggatttgagcaggaggtattgaagggtgaatagaagctcaccaatcattttgggcagaggggcaaggacctgcaaaaccactgaagcatgaaggaaatggtgagtttagggaaaatgaagagaagatggctgtgactgaagcacaggatttgggattggagaagggactggaggtgaggctgaaaagaggcaaactcagaaaagatgttgtgctgggcagtctggacattatctttgaagcccaccacatataagtcatagggctactggaggttttaagctaagagtgactattcaatttcaacttaagagaagataggttgagagggaacatggcttgagatgagccatgagcaaaggaaagactacaacaaagccaggagtgaggagtgtgtgaagcaagaaagtgacagttgaaagcagtgcagaggggatgaatctgagaggcatctatgaggtggaactcaaatgacatgataataatacagggcatttctctgtgtcagatgctgtcctaagtccttactccattgatcttcacagcaactcagcatagttaatattttatgcataaagaaatcggcacttgaaggagtaattggccccagattacactgcctataaggattcaaatccaggtttgtttggctccaaaaactggctcctaattttcagaaggagaagcaacccagggcaatgcccaattttgcttcttaggcaatggaggaatccacaatcggaaggagttttcagcagtgccccatttggggtgggttgaatttgaggtccctgcatgatacccactttgctcacttcagtgcctaaaactgagtatggttcatagtaggtgttcaataagtgttgatgcagtgaatacatgcatggggagatatgcatcaggcaatgggaaattcaactctaaggcttaggggaaagctggagcttgaagacagagctttagaaaacagtagcatagaagggagtaggaaccatgagtttagacaatacaattcaggaagaactttgtagcaaggataaagaggcaaaaaattaaagaggtgagagctaagtgtggtgcctggggaatcttaaggtgtgggcacggggaggagatgccagcaaagaacatgaataaaaagcggtagcacagcccctcccatctggaagccaaaaagaattgtaaatggaggaagttagcagaaggatcaaatacttgaagagggtggaattggaataaaaccagggcatttgaaaaattgggttgtcactgcaatcttaacaagagaagttttggcaggatgatggaggcagaaagctgagagaatcatcagttagaacgtttttgacttcagagaacagaaaatgcagttcataatggctttaaaacaggggcttgtttttctcccagcaatttgagaggccaaggcgggtgcatcaggaggtcaagagaccgagaccatcctggccaacatggtgaatccccatctctactaaaaatacaaaaattagcggggcatggtggtgcacgcctatagtcccatctactcaggaggctgaggcaggagaatcacttgaacccaggaggtggaggttgcagtgagctgagatcatggccactgcactatagcctggagacacagcgagactccgtctccaaaaaaaaaaaaaaaagaaggcagaaggtgaatagttcaagggtgggtttaggactcagtgataataggattctgcctggcttctcatggttctctaggtcttccattcatggcaccatgccctcactaggcatgctgccagagcaggaggggcaggtggagggttctcttgtgtctgtcttatcagggaagaagagctttctcagaagcccccagcagactcccttttcatattatggtccagcaatgagtcacagacctatgcaccacctgcaaaggagccagagaaaacaaacgcccagcgcttttagcctgaaaatgagaatctggtttgctggggaagataaagggtgtcggaaaatggctgttgggtaaatcattgatgtctgccactaggaatgaaaggcaaatcaggaactggcacacatgctttcagggagatggctgcaagggagagggcaaagactgggaagttgcttatgtggtgccagactatttggaagatcatggattgcggtgtttgtgttgtgtggtcatcattttgttctttgtttacagaacagagaaagtggattgaacaaggacgcatttccccagtacatccacaacatgctgtccacatctcgttctcggtttatcagaaataccaacgagagcggtgaagaagtcaccaccttttttgattatgattacggtgctccctgtcataaatttgacgtgaagcaaattggggcccaactcctgcctccgctctactcgctggtgttcatctttggttttgtgggcaacatgctggtcgtcctcatcttaataaactgcaaaaagctgaagtgcttgactgacatttacctgctcaacctggccatctctgatctgctttttcttattactctcccattgtgggctcactctgctgcaaatgagtgggtctttgggaatgcaatgtgcaaattattcacagggctgtatcacatcggttattttggcggaatcttcttcatcatcctcctgacaatcgatagatacctggctattgtccatgctgtgtttgctttaaaagccaggacggtcacctttggggtggtgacaagtgtgatcacctggttggtggctgtgtttgcttctgtcccaggaatcatctttactaaatgccagaaagaagattctgtttatgtctgtggcccttattttccacgaggatggaataatttccacacaataatgaggaacattttggggctggtcctgccgctgctcatcatggtcatctgctactcgggaatcctgaaaaccctgcttcggtgtcgaaacgagaagaagaggcatagggcagtgagagtcatcttcaccatcatgattgtttactttctcttctggactccctataatattgtcattctcctgaacaccttccaggaattcttcggcctgagtaactgtgaaagcaccagtcaactggaccaagccacgcaggtgacagagactcttgggatgactcactgctgcatcaatcccatcatctatgccttcgttggggagaagttcagaaggtatctctcggtgttcttccgaaagcacatcaccaagcgcttctgcaaacaatgtccagttttctacagggagacagtggatggagtgacttcaacaaacacgccttccactggggagcaggaagtctcggctggtttataaaacgaggagcagtttgattgttgtttataaagggagataacaatctgtatataacaacaaacttcaagggtttgttgaacaatagaaacctgtaaagcaggtgcccaggaacctcagggctgtgtgtactaatacagactatgtcacccaatgcatatccaacatgtgctcagggaataatccagaaaaactgtgggtagagactttgactctccagaaagctcatctcagctcctgaaaaatgcctcattaccttgtgctaatcctctttttctagtcttcataatttcttcactcaatctctgattctgtcaatgtcttgaaatcaagggccagctggaggtgaagaagagaatgtgacaggcacagatgaatgggagtgagggatagtggggtcagggctgagaggagaaggagggagacatgagcatggctgagcctggacaaagacaaaggtgagcaaagggctcacgcattcagccaggagatgatactggtccttagccccatctgccacgtgtatttaaccttgaagggttcaccaggtcagggagagtttgggaactgcaataacctgggagttttggtggagtccgatgattctcttttgcataagtgcatgacatatttttgctttattacagtttatctatggcacccatgcaccttacatttgaaatctatgaaatatcatgctccattgttcagatgcttcttaggccacatccccctgtctaaaaattcagaaaatttttgtttataaaagatgcattatctatgatatgctaatatatgtatatgcaatatatataggctcttgcttgatctctccaggaggtagtgattatgagaagggggtggagaatgatgagttccttcaccaggagcaaaggacggggatcgtgtggaaccactgcagaactatttccgaaatcaactaagtggagagagccaggaaggctgcatcagaacccagtaaagcttcttgtctggatctgagctggtttgttttgtgcttgcttttccctgccttgccactcccctcactcttctcttttccccacagcctttttcacatagctcttggctgtaggattgccccactccaaaaaccagtgtgtggaggtccaggagtgagaccaggaaagaatgtgaaagtgactacacaaggactcctcgatggtcgtggaaaaggaaagtcaattggcagagcccctgaagccagtcttcaggacaaagaaggagcctagagacagaaatgacagatctctgctttggaaatcacacgtctggcttcacagatgtgtgattcacagtgtgaatcttggtgtctacgttaccaggcaggaaggctgagaggagagagactccagctgggttggaaaacagtattttccaaactaccttccagttcctcatttttgaatacaggcatagagttcagactttttttaaatagtaaaaataaaattaaagctgaaaactgcaacttgtaaatgtggtaaagagttagtttgagttactatcatgtcaaacgtgaaaatgctgtattagtcacagagataattctagctttgagcttaagaattttgagcaggtggtatgtttgggagactgctgagtcaacccaatagttgttgattggcaggagttggaagtgtgtgatctgtgggcacattagcctatgtgcatgcagcatctaagtaatgatgtcgtttgaatcacagtatacgctccatcgctgtcatctcagctggatctccattctctcaggcttgctgccaaaagccttttgtgttttgttttgtatcattatgaagtcatgcgtttaatcacattcgagtgtttcagtgcttcgcagatgtccttgatgctcatattgttccctattttgccagtgggaactcctaaatcaagttggcttctaatcaaagcttttaaaccctattggtaaagaatggaaggtggagaagctccctgaagtaagcaaagactttcctcttagtcgagccaagttaagaatgttcttatgttgcccagtgtgtttctgatctgatgcaagcaagaaacactgggcttctagaaccaggcaacttgggaactagactcccaagctggactatggctctactttcaggccacatggctaaagaaggtttcagaaagaagtggggacagagcagaactttcaccttcatatatttgtatgatcctaatgaatgcataaaatgttaagttgatggtgatgaaatgtaaatactgtttttaacaactatgatttggaaaataaatcaatgctataactatgttgataaaagatttaaaaacaa

SEQ ID NO: 35 - DNA, 64992 bp, Homo sapiens
  misc_feature (64492)..(64492): n is g or a
ctggctgtttttttacactgtggtgtggaagattgtgttgtgttcacaacttttcacttcttcccctgtgtgattacacacacctgcccttgtggtgtgacttgcagtgcgccctacaggccacacaccccacgccctccaccactggctctgctgctggaatgtgagcagaagtgacatctgcctcatccaagcggagcctcttgctcagccacaggaaggcccattccagatcacacccgtcagcccgtgcgccctggtgaatgagaagacacagggagctgcagccacatataacatgagcaagaagtctgtgtttgctgtgataagccactgagttttaggggttgtttgttaagaagcacaaaaaccgattaagacatgtggtatatagtgacttcatatatagaatctggaaaactatccatttattttcaatcatggaattcaatatgacaagcatcccggagggtctacctatgccagactgggttggaaacagaaagacagatgttaatgccagtgtcctttacacctccaagtccagggccagctgtggagtgggaggggtagagaaggtcctgtgcacagtcacagtgcgctgtgcagagcaggaacagaggcatctgtgaaaagtgctgagagcctggaggacagagtgactaatgcaatgacagtcttgcatcataggaataacagccacagcaggattttattgctgccaaagaaactgccatttaaaaattgccagccatccgggaggctgaggcaggagaatggcatgaatccaggaggcggagcttgcagtgagccgagatcgggccactgcactccagcctgggcaacagagccagactccatctcaaaaaaaaaaaaaatgccaaccatctctctttctaaagtggaatcctcaagtctcgtttattctggggacatttgagtaggctgttcgagttaagcaggtggaagatgatgatccctcatcatcattctgagggatgagtgtctgaagactttttggtaaggaagggtcttggcatagcccaccccatgccacctcccttgatctgtgatatccccagcagctggggaggttggagcattttgcaaagaggccccgaagcctccagaaagtaaaccttcaagagcccatccttccttcctcttttgtttttgctcattatgaaaacttccctgacaaattgaaaaggcttcaggtgagattagcccacaggaaaaaccaccaagggccacccagaggggccacactgtgacagaaggagtatgggctggtgagctgacctctggaagacagtgcatgaattgaggagaagagattggttccaggcatgggaggaatgaggctggaaatttcttcagacattgccacttcggcactctgtgtgtgtgtgtgtgtgtgtgtgtgtgtgtgtgtgtgtgtgtgtgtaaacagagtcctgtaatgcaaggtccggccttggcagccccagcctggagccacagtgagatgtgagccgagggttatgctgggaaaaacctctccctcccagcacctgaaaggctctgcaggcccagcagctcagcaagcaagggtaagggcatggactaacatcttatttcatactatcccttataacacatcctaatgtaatcagctcacaatatgaaattatttcatttctctccagtcattgtttcaatggggccttagggttgactggattctggagggccctgcctagaggagggggtgcattctgtccctatgtcccctcctgctccatcctccacagcacgtgcctagtggtctaccttgtggggaattcttgtacctccctcttctaggcatggactagcattgagaagtgggagaggagtgttaggaaaaagggcaaatatagacataccttgtcttattgtgctttacagatattgtttttgttgttgttgttgttgtttacaaattgaaggtttgtggcaaccctgcctcgagcaagtctattggtgctgtttttccaacagcatgtgcttgttttacatctctgtgtcacattttggtaattctcccaatatttcaaactttgtcattatttctatatctgttatggtaatctgtgatcagtgatctttgatgtcactattgtagttgttttggggcaccatgaagtgcacccatgtaagatggcaaacaatcaataaatgttgtgtgtgttctgactgctccatggactgcctgttcctgagacacaataatgtatatataacaattatatatatatatatttataacaattatatatatatatatatatattttttttttgaggcagagtcgcactctgattgcccaggctggagtgcaatgatgtgatttcagctcactgcaacctctgcctccccaggctcaggtgattctcccacttcagcctcccaagctgggactacaggtgtgcaccatcacacccggctaattttttttttgtatttttaggagagacagggttttgccatgttgcccaggctggccttaaactcctagactcaaacaatccacctgcctcagcttcccaaagggctgggattacaggcatgagccactgtgcccagcccaagacacaataatattgaaattaagccaattaataaccctacaatggcctctaagtgttcaagtgaagggaaaagtcccacgtctctcactttaaatcaaaatctagaaatgattaagcttagtaaggaggacatattgaaagtcaaggccaaaagctcacctctgcaccagttagccaaattgcgacttcacaggaaaagttcttgaaggatatttaagctctactccagggaacatgcaaatgaagagaaaacaaagcagccatattgctaatatggagaaagtttgagtggtctggagaaaagatccaaccagccacaacatttccttaagtcaaagcctaatccagagcaagactctaactctcttcaatgctatgaaggcggagagaggtgaggaagctgcagaagaaaagtttgaagctagcggaggttggtttgtgaggtttaatgaaagacaacatctccataacataaaaatgcaagatgaagcagcaagtgcaaagggagaagctgtggcaagttatccagaaaatctagataagataattgatgaaagtgtctacacgaaacaacagattttcagtgtagacaaaacagtcttatgttggaagaagatgccatccaggactttcacagctagagaggagatgtcaaggcaagctgcaaagctccacaggacaggctgactctctttttagaggtgaatgcagctgatgactttaagttgaagtaaatgttcatttactattttgtaaatcctggtgtcattaagaattatgcgaaatctactctatctgtgctccataaatggaacaataaagcctggatgacaacacatctgtttacagcatggtttactgaatatttcaagcccactattgagaactattgctcagaaaaaaagattcctttcaaaatattactgctctgcaccatgtcgatcaagagctgtgttggagatgtacgagaatattcatgttgttttcatccctgctaacacaaacatccattctgcagtccatggaccaagactttcaagtcttattaagaaatatatttcataaggctattaagaaatagctatatatatatatatagccttatatagtttatatagctaccattgatagtgattccattgatggatctgagcaaagcaaattgaaaagcttctggaaagtagtcattattctagatgccattaggaacatttgtaattcatgggaggaggtcaaaataccaacattaacaggagtgtgaaagacattgattccaacccccatagatgactttcaggggttcacgtcttcagtggaggaagtcgctgtagatgtggtggaaacagcaagagaactagaactagaagtggagcctgaagttgtgactgaattgccgcactctcatgatcaaacttgaacagatgaagagttgcttcttacatatgagcagtgaaagtggtctcttgagatggaatctcctcctggtgaagatgctgtgaacacggttaaaatgacaacaatcgatttagaatattacataaatttagttaataaagcagtggcagggtttgagaggattgactccaattttgaaagaagtgggtaaaatgctatcaaatagcatcacatggtatggagaaatcttttgtgaagggaagagtcgaccaaggtggcaaattgcattgtcatcttattttaagaaattgccacagccacccccagctttagcaaccaccaccctgatcagtaagcagccatcaacatcaaaacaagaccgccatcctcttcagcaaaaacactatgacttgctgaaggctcagatgatggttagcatttttagcaatacaatatttttaattaaggtatgcacattggtttttctgacataatactattgcatacttaatagactacagtataggataaacacaacttttatatgcactgggaaaccaaaaaggttatttttgagatatttgctttactgtggtggtctgaagctgaactcacaatctcaccaaggtgtgcctgaacctctttagctaactggccactgccacagtccactctgtgttggtcaagatgccccagagtggcaggcacactgtgtggtcacatccaagggcctagatatggtgggggctccaaatggatctagatatgtgagatctctctttgatttgacttcttccaacccaccattttctgggtgctgggctcatctcacccagaaagtaggacccaatgtgacagttcctgcccagttccctcctgtggtagccacttgacccaggggcactcttgatccttgcagcctcacttacacaccctatctctacccctattaactctctccaatccccactccccctgctcagcttgtctgctgcccagtgggggccccacccatgctggcctctccttttgcaagtccccattcctcatatggtttcttcagagcccctttctttggctttgaggagagatgccctcactcgcttccccaccaatcctgcccacttctacaatccattcattatcctaattgcctccgtatacagactggagtgagaggagttgatgtgatgggtgtggatacagggctggtgctgtcatcttctagtaagccctgggagaggtgtctgagcccaggtgtcagtggttttctttggaactgtgagtgcataacacttctttgccttcagccttaggccatagttgctagttctgggacaaccagaaaagccctacataatctcgtgttatgtgcagagctgagtatagagctccaggtatgatctgactcacttaagatcacagtgagtctattgtattgttgaactgttagcttagacatctgttactgtacctacatggcactagcctcacgcctagacaccgatctgaaagaaatcccctaaatgcatagagaagacttctcagctgagctaaggggctcccaccaggtttgagcctatctaatgaatccatgaggtagacagcctgcacatgtccacttggtttgatgaattgcacaaatccctatgggggatgtggttcatgggctgggaagtgggttaccctgggaaaggtctacaggacagaggcagggatggagacaacagcatggtgagttcccaacccacccacgatgataggtgtctgaggcagaaggtaaagaggctgtcacctggtgggtgtcataagactcaagtgtcattgttgaggcacatgggtaacaaagcgtggcactggatgggggtagattcttcctatttctgtgaggatcagggggactccctggctctcctgctaaaggtggctctagggacaggaagagtgtacttcttgacagggatgtcagagcactgatggtgacaatcagtgtgacactgctcacatgactgaacaaccgagaagagcccgactgtctactgaacaacgggaagagcccgactgtcaatgacggagctctgttaaatatagttaaggctattttgttgaatgaatgaagccagacaggaaagaggacagtatctttaatccatttatagaagttaaagacaggcttatttaatctctatgaagacagagtggcccttacctctgggtggagcaaaaggcaccttctgaagtgatagggatgttccttatcatcttgatccggagtggtagttacatgcatgtgtgcatatcaaaactcaccaagctgtaccactaagtgtgttcttcctcaataaaaataataaagaactacacttataaagaattttttaataatataggaaaatgtctacactataatctttagctaaaaaaaaaaaaaaaagaagccgcctacagaatggtatatgcatgagaacaattaatcgaaaagtgcatgggaaaagtcaggattgaaacatcatgttttaaaagacattgttttgatactgtgagaatgtacctaagtttttccttttttctgtttttcccaattttatacaatgagcatgtgttggttttataattagacattttgtttgtttggtttggttttgagacacagcttgctgtcacccaggttggagtgcaatggcccaatcttggttcactgcaacctccatctcctgggttcaagagattctcccacttcagcctcctgagtagctgggactataggggcgcaccaccacatccagctaattttgtgtatttttagtagagatggggtttcaccatgctggccaggttggtctcaaactcctgacctcaagttatccactcgccttggcttcccaaagtgctgggattataggcatgagccaccgcacttggcctagacatttgtttttaaaaataaaagattcatttgctctttttacagcccgtctcactgttgactgatattgaccaggagtcaactcaggccccagggattttcacaacagctgctgtatggcagggtttctgctcactgtgctcatgtagttggcccttgcacccaaagtgaataattaacattctccccatcctgttgacgatgctctgaaaatatggtccagaaatggtgtgagcaaggagacagcaaagcaatgcttggaacataggtgcagtgactagacatggggcagctgtttaaagacaaaaaggccccaaaaaggagggatggcacgaaacaccctccaatatgggcatggagtctagagtgacaaagtgatcaaaagttcatttcctatggggtgtccgaatgtacttaataataaaaagagaacaagagccatgcaaactgagagggacaaagtagaaagagtagcagacaccaagcaactaagtcacagcatgataagctgctagcttgttgtcattattgtatccagaacaacatttcatttaaatgctgaagaatttcccatgggtccccactttcttgtgaatccttgggctgaacccccctgtcctgagtggttactagaacacacctctggaccagaaacacaaaagtggagtaacgcacactgcaaagctgtgcttccttgtttcagcctgtgaatcctcaccttgtttcccatctagcctatatttttcaaactaacttggccatagaatcatgtagtatttagggtggaagctgccccaggtctagcacgtcatttaacagatgaggaaatggaagcttgggcagtggaagtatcttgccgaggtcacacagcaagtcagcagcacagcgtgtgtgactccgagcctgctccgctagcccacattgccctctgggggtgagtatgtcttcacatcctccaataccctaatgacagacaaacagaacatggcaaagcctcagctctgcatggtgaaagtaagaaccagcaattgccacaaacagaaatacagtgttggtccggcagcctccgggggttctgcacaagtggattaccagtgaatacaaggctatctatctttcgaaaaaccaaagttgtatttatgctatctattttctataaaattttatattaatttatttgttacctatttttgaactctttcaaaagcacactttatatttccctgcttaaacagtcccccgagggtgggtgcccaaaaggctctacacttgttatcattccctctccaccacaggcatattgagtaagtttgtatttgggtttttttaaaacctccactctacagttaagaaaactaaggcacagagcttcaataatttggtcagagccaagtagcagtaatgaagctggaggttaaacccagcagcatgactgcagttcttaatcaatgccttttgaattgcacatatgggatgaactagaacattttctcgatgattcgctgtccttgttatgattatgttactgagctctgttgtagcacagacatatgtccctatatggggcgggggtgggggtgtcttgatcgctgggctatttctatactgttctggcttttcccaagcagtcatttctttctattctccaagcaccagcaattagctttaccttttcagcttctagtttgctgaaactaatctgctatagacagagactccggtgaaccaattttattaggatttgatcaaataaactctctctgacaaaggactgctgaaagagtaactaagagtttgatgtttactgagtgcatagtatgtgctagatgctggccgtggatgcctcatagaatcctcccaacaactcatgaaatgactactgtcattcagcccaatacccagacgagaaagctgagggtaagacaggtttcaagcttggcagtctgactacagaggccactggcttagcccctgggttagtctgcctctgtaggattgggggcacgtaattttgctgtttggggtctcatttgccttcttagagatcacaagccaaagctttttattctagagccaaggtcacggaagcccagagggcatcttgtggctcgggagtagctctctgctgtcttctcagctctgctgacaatacttgagattttcagatgtcaccaaccgccaagagagcttgatatgactgtatatagtatagtcataaagaacctgaacttgaccatatacttatgtcatgtggaaaatttctcatagcttcagatagattatatctggagtgaagaatcctgccacctatgtatctggcatagtgtgagtcctcataaatgcttactggtttgaagggcaacaaaatagtgaacagagtgaaaatccccactaagatcctgggtccagaaaaagatgggaaacctgtttagctcacccgtgagcccatagttaaaactctttagacaacaggttgtttccgtttacagagaacaataatattgggtggtgagcatctgtgtgggggttggggtgggataggggatacggggagagtggagaaaaaggggacacagggttaatgtgaagtccaggatccccctctacatttaaagttggtttaagttggctttaattaatagcaactcttaagataatcagaattttcttaaccttttagccttactgttgaaaagccctgtgatcttgtacaaatcatttgcttcttggatagtaatttcttttactaaaatgtgggcttttgactagatgaatgtaaatgttcttctagctctgatatcctttattctttatattttctaacagattctgtgtagtgggatgagcagagaacaaaaacaaaataatccagtgagaaaagcccgtaaataaaccttcagaccagagatctattctctagcttattttaagctcaacttaaaaagaagaactgttctctgattcttttcgccttcaatacacttaatgatttaactccaccctccttcaaaagaaacagcatttcctacttttatactgtctatatgattgatttgcacagctcatctggccagaagagctgagacatccgttcccctacaagaaactctccccggtaagtaacctctcagctgcttggcctgttagttagcttctgagatgagtaaaagactttacaggaaacccatagaagacatttggcaaacaccaagtgctcatacaattatcttaaaatataatctttaagataaggaaagggtcacagtttggaatgagtttcagacggttataacatcaaagatacaaaacatgattgtgagtgaaagactttaaagggagcaatagtattttaataactaacaatccttacctctcaaaagaaagatttgcagagagatgagtcttagctgaaatcttgaaatcttatcttctgctaaggagaactaaaccctctccagtgagatgccttctgaatatgtgcccacaagaagttgtgtctaagtctggttctcttttttctttttcctccagacaagagggaagcctaaaaatggtcaaaattaatattaaattacaaacgccaaataaaattttcctctaatatatcagtttcatggcacagttagtatataattctttatggttcaaaattaaaaatgagcttttctaggggcttctctcagctgcctagtctaaggtgcagggagtttgagactcacagggtttaataagagaaaattctcagctagagcagctgaacttaaatagactaggcaagacagctggttataagactaaactacccagaatgcatgacattcatctgtggtggcagacgaaacattttttattatattatttcttgggtatgtatgacaactcttaattgtggcaactcagaaactacaaacacaaacttcacagaaaatgtgaggattttacaattggctgttgtcatctatgaccttccctgggacttgggcacccggccatttcactctgactacatcatgtcaccaaacatctgatggtcttgccttttaattctcttttcgaggactgagagggagggtagcatggtagttaagagtgcaggcttcccgcattcaaaatcggttgcttactagctgtgtggctttgagcaagttactcaccctctctgtgcttcaaggtccttgtctgcaaaatgtgaaaaatatttcctgcctcataaggttgccctaaggattaaatgaatgaatgggtatgatgcttagaacagtgattggcatccagtatgtgccctcgaggcctcttaattattactggcttgctcatagtgcatgttctttgtgggctaactctagcgtcaataaaaatgttaagactgagttgcagccgggcatggtggctcatgcctgtaatcccagcattctaggaggctgaggcaggaggatcgcttgagcccaggagttcgagaccagcctgggcaacatagtgtgatcttgtatctataaaaataaacaaaattagcttggtgtggtggcgcctgtagtccccagccacttggaggggtgaggtgagaggattgcttgagcccgggatggtccaggctgcagtgagccatgatcgtgccactgcactccagcctgggcgacagagtgagaccctgtctcacaacaacaacaacaacaacaaaaaggctgagctgcaccatgcttgacccagtttcttaaaattgttgtcaaagcttcattcactccatggtgctatagagcacaagattttatttggtgagatggtgctttcatgaattcccccaacagagccaagctctccatctagtggacagggaagctagcagcaaaccttcccttcactacaaaacttcattgcttggccaaaaagagagttaattcaatgtagacatctatgtaggcaattaaaaacctattgatgtataaaacagtttgcattcatggagggcaactaaatacattctaggactttataaaagatcactttttatttatgcacagggtggaacaagatggattatcaagtgtcaagtccaatctatgacatcaattattatacatcggagccctgccaaaaaatcaatgtgaagcaaatcgcagcccgcctcctgcctccgctctactcactggtgttcatctttggttttgtgggcaacatgctggtcatcctcatcctgataaactgcaaaaggctgaagagcatgactgacatctacctgctcaacctggccatctctgacctgtttttccttcttactgtccccttctgggctcactatgctgccgcccagtgggactttggaaatacaatgtgtcaactcttgacagggctctattttataggcttcttctctggaatcttcttcatcatcctcctgacaatcgataggtacctggctgtcgtccatgctgtgtttgctttaaaagccaggacggtcacctttggggtggtgacaagtgtgatcacttgggtggtggctgtgtttgcgtctctcccaggaatcatctttaccagatctcaaaaagaaggtcttcattacacctgcagctctcattttccatacagtcagtatcaattctggaagaatttccagacattaaagatagtcatcttggggctggtcctgccgctgcttgtcatggtcatctgctactcgggaatcctaaaaactctgcttcggtgtcgaaatgagaagaagaggcacagggctgtgaggcttatcttcaccatcatgattgtttattttctcttctgggctccctacaacattgtccttctcctgaacaccttccaggaattctttggcctgaataattgcagtagctctaacaggttggaccaagctatgcaggtgacagagactcttgggatgacgcactgctgcatcaaccccatcatctatgcctttgtcggggagaagttcagaaactacctcttagtcttcttccaaaagcacattgccaaacgcttctgcaaatgctgttctattttccagcaagaggctcccgagcgagcaagctcagtttacacccgatccactggggagcaggaaatatctgtgggcttgtgacacggactcaagtgggctggtgacccagtcagagttgtgcacatggcttagttttcatacacagcctgggctgggggtggggtgggagaggtcttttttaaaaggaagttactgttatagagggtctaagattcatccatttatttggcatctgtttaaagtagattagatcttttaagcccatcaattatagaaagccaaatcaaaatatgttgatgaaaaatagcaacctttttatctccccttcacatgcatcaagttattgacaaactctcccttcactccgaaagttccttatgtatatttaaaagaaagcctcagagaattgctgattcttgagtttagtgatctgaacagaaataccaaaattatttcagaaatgtacaactttttacctagtacaaggcaacatataggttgtaaatgtgtttaaaacaggtctttgtcttgctatggggagaaaagacatgaatatgattagtaaagaaatgacacttttcatgtgtgatttcccctccaaggtatggttaataagtttcactgacttagaaccaggcgagagacttgtggcctgggagagctggggaagcttcttaaatgagaaggaatttgagttggatcatctattgctggcaaagacagaagcctcactgcaagcactgcatgggcaagcttggctgtagaaggagacagagctggttgggaagacatggggaggaaggacaaggctagatcatgaagaaccttgacggcattgctccgtctaagtcatgagctgagcagggagatcctggttggtgttgcagaaggtttactctgtggccaaaggagggtcaggaaggatgagcatttagggcaaggagaccaccaacagccctcaggtcagggtgaggatggcctctgctaagctcaaggcgtgaggatgggaaggagggaggtattcgtaaggatgggaaggagggaggtattcgtgcagcatatgaggatgcagagtcagcagaactggggtggatttgggttggaagtgagggtcagagaggagtcagagagaatccctagtcttcaagcagattggagaaacccttgaaaagacatcaagcacagaaggaggaggaggaggtttaggtcaagaagaagatggattggtgtaaaaggatgggtctggtttgcagagcttgaacacagtctcacccagactccaggctgtctttcactgaatgcttctgacttcatagatttccttcccatcccagctgaaatactgaggggtctccaggaggagactagatttatgaatacacgaggtatgaggtctaggaacatacttcagctcacacatgagatctaggtgaggattgattacctagtagtcatttcatgggttgttgggaggattctatgaggcaaccacaggcagcatttagcacatactacacattcaataagcatcaaactcttagttactcattcagggatagcactgagcaaagcattgagcaaaggggtcccatagaggtgagggaagcctgaaaaactaagatgctgcctgcccagtgcacacaagtgtaggtatcattttctgcatttaaccgtcaataggcaaaggggggaagggacatattcatttggaaataagctgccttgagccttaaaacccacaaaagtacaatttaccagcctccgtatttcagactgaatgggggtggggggggcgccttaggtacttattccagatgccttctccagacaaaccagaagcaacagaaaaaatcgtctctccctccctttgaaatgaatataccccttagtgtttgggtatattcatttcaaagggagagagagaggtttttttctgttctgtctcatatgattgtgcacatacttgagactgttttgaatttgggggatggctaaaaccatcatagtacaggtaaggtgagggaatagtaagtggtgagaactactcagggaatgaaggtgtcagaataataagaggtgctactgactttctcagcctctgaatatgaacggtgagcattgtggctgtcagcaggaagcaacgaagggaaatgtctttccttttgctcttaagttgtggagagtgcaacagtagcataggaccctaccctctgggccaagtcaaagacattctgacatcttagtatttgcatattcttatgtatgtgaaagttacaaattgcttgaaagaaaatatgcatctaataaaaaacaccttctaaaataattcattatattcttgctctttcagtcaagtgtacatttagagaatagcacataaaactgccagagcattttataagcagctgttttcttccttagtgtgtgtgcatgtgtgtgtgatgtatacaaagagagagataattgtatttttgtattttcttttaaataatttttaaaattgacccttttcctgagacaaattgccagaatagtttgtatttagagatggtacctctaagagtaaggttgctggttgctgagcaattgacttgaaaacttttaaaattcaaattttaattccactactcaaaagaattgccatgttttaaaaaagagaattggtgccataagttagttgtctatgtttgaaaatgaagaagatatgcaacgtcatggcctggtcacttacccgcagccctgagttgtaggcacatcatatgtgagaatgaggatgcttttctttcatttaaaatccctccccaaaacttggctctaattgcagtcatgacaatcatgtacatttggatttatgtgcacgagtctcttaccctgagagaggacaggtgctacaggtggaggggacccgtctgggtcacgttcacattttgaacatgctggttttcagtcactgcacactcatctcccagcacaggtcatgggcagcagatgcaaaagctgcccgtggtcctatttggaggtgcatgaaatgagcagaagacagaacagcttgatctgactagaagggcagcttgtccctaccaagacttgaaggattgcctttcatctgttagggtaaaaggtagaatgaaccaaggaagggcaggagggggctggggttagggtagaaggaaggggccatggagaagggagatccatcccataggaggaaggcagtgcggcagggaggtttgaaggtatcagcttttgtggctgacatacatgcagtcatgtcaattgctcgtttttccttttccatcttattaaatgtcttccaacgttagcacgaagaaaagctatttgcagtgttgccagcctttccagagcccgtccccattacctccccaggcccatgcctttactccttggagtttcaactcacgaccttcaggatctgactttattcaccaactctggggtgaacgtaccttctgtctccacccagaggtctctatcaaagaggagattgcatgccatggataaagtcaaagtagaggtgactgtccttaggaagagtaatgtgaaaattcataaactgggattctgtttacattttgtactccaggggttcttagtttaaatcgctctgaataaattaagatgcaatggcatttcaactgttatgattaaatttacaaatcatttattttctatcacggggagagatagagctccaaatgcaaacataactgctcaagtgttaacacttataatgaaaacataagaattaccaccaactaccctgggggctagaagcagaaatgtgaaccagaaaacaaatcatgaactttcctttttttttttgagatggagtctcgctctgttgcccaggctggagtgcaatggtgcgatctcggctcactgcaaccactgcctcccgggttcaagcaattctcctgcctcagcctcctgagtagctgggactacaggcatgcaccaccacgcctgggtaattttttgtatttttagtagagacagggtttcaccgtattagccaggatgctctcgatctcctgacctcgtgatctgcccgcctcggcctcccaccgaagtgctgggattacaggcatgagccactgtgcccggccaacaaatcatgaactttctaactgcagttccttgtagcttgttaacacatccacttacttattgtcagagtacgtggagattttccacaaccctcggggataaggctgaacagaagaggcaaaaacgtgaaaacatttcgatagctcctatactttgaaataaaattcactgtaaaagttgcttgtatttttccaaaacagagtcaacccttaatatttaagattctgtatacaaatacatatttttatataattaatatatattgtcatatgacatatatctttatattaatatgcatgcatataatatatatttccttcctaattttctataagcaattttacaagactgacttctatttgcctccttattgttactacgtggtttgataatccgttttgtgtcattgtgattctgtcatgttttggggacttatttttgtttctctgggtggtcactagtttttttaaagcattcatggaagagtgtgaatcttttacaagctaggaagccatggcaagccttgggtcatactgcccccgcgaggccacattggcaaaccagcaagggtgttcaacttccagacttggccatggagaagacacacgaggaggcttttcacattcagctctttaatgtttgtctctgccggcaccatcccagttgtgaaaaagaggtatttccacagcggctcagggtaggtagtgcacagctcacattcatcatttctgaaaaccgagaggagtctccattcggggtacaggttgatgcctgtcgtggaatgaaggttccaacacccagaccaatctctgcagtgtgctgctctcatgagcttgcaacaagatcagaaaatgttttgtgactaagcatttttcatattgcataaaatgcttcaagctcctcccttgtttctctctataatcctgtatatctgatgattgtgggtaccaagtgtttgaaataatcaaatgtgatttgatgttggtaaatttctttttttttttttttttacttctattttttttattatactttaagttttagggtacatgtgcacattgtgcaggttagttacatatgtatacatgtgccatgctggtgcgctgcacccactaactcgtcatctagcattaggtatatctcccaatgctatccctcccccctccccccaccccaccacagtccccaaagtgtgatattccccttcctatgtccatgtgatctcattgttcaattcccacctatgagtgagaatatgcggtgtttggttttttgttcttgcgatagtttactgagaatgatggtttccaatttcatccatgtccctacaaaggacatgaacatagcaaagacttggaaccaacccaaatgtccaacaatgatagactggattaagaaaatgtggcacatatacaccatggtaaatttctttatcattcgcactctcctttctctattattgttattgtaactgaaccgcagattagtcactcattgcttgcagaatccaattaacaagagcgaggtcagatataaagaaaatgatttattccaaacctccttcagggaagaggtgcagcctcctgcctctaaatgcactgcttcgccaggcgtggtggctcacacctgtaatcccagcactttgggagaccgaggagggcagatcacttaaggtcaggagttcaagaccggcctggccaatatagtgaaacccctgcctctactaaaaatacaaaaaattagccagacgtggtggcgggtgcttgtaatcccagctactcgggaggctgaggcaggagaatcgcttgaacctgggaggtggaagttgcagtgagctgacatctagccactgcactccagcctgggtgacagagtgagactctgtctcaaaataaataaataaataaataaataaataaataaataaatagtaaatgcactgctttgcttttggagcagaaagcaggcactttgaaaaggcaggggaggaagtgagcaagggcagggggtctgcacactggcatggtgcctgatctatccaggcagttgaattggcactttcataggcagaaataagttgaaaaagtggcctaaaactctctaggtgggagtggatagtgggcatgccttcaacctgcctttctggagggtgagttccatggcaaccccctgaagggtgagagttccatggagatcatgctttggtctgtaaatcagctgttaactctctagaaagttctgtcttggagcatatagttagatgaacttgccctgtaaagaatgtctggtgaaggggaagtaaaaggtgagatttgcatttctaaagggctaagtagaaagtggggtacaagaggaaaggagaaaagagaaaataatttaaaaaataattgtaacttattcccttttacttagaaaaaagggaatactcagttacattatcacctcgtttacatcaaaccctcttatggaatcctatggtttgaaaacaaaaaggttgttgaggaccagtgagcccaacccctttgctttataaatgaagagcattgcctgccctaagccccagagactctgatgtcgtgggtctggagtgggctccaacagcggcatgttttgatggtgcttcccagtggcacgccagcgatgagcctttgagtagggaaagtaggagcactcgtgactcccttcacgatcagcacctgtgtgctaataaattcacaaaagccaacatattggagtcactcagggagttttacaaatagtgaggttaaatccaacctcaaatagttctgattcgatctgcctgcattgctgccctgtggttccccactgtagaagctccccaggtgattctaagtgtagccaagtctgagaaatactgcctaaagcctgttggactgacagcaagggctgttgtctgagcaagactttgcctggcctggggtggcatgtgcaccaggaagagtctcaactttcataacagaacattccccaagctggtttttttaaagcatgtgaatctagacttcattggcaataccaaagatctgtatttgaggctccaagtatttcactttcatttttggttttgggttatgttttcacccttcctttccaagtgaaaagtaaacagaagtgggatgtctggcgcccatgctgagcttggcaacttcaaattcaatagagaagaagtctcttgtatagaaaagggcctgtctgagatgtttctcaaataaatatagattttgcttatgtggctaaaggattcttctccccccatttccttatccctgcagtgagccatccttcttaactctttccatgaaagcattattcctgaagaactgggaactcatgccagccctgatcaggcaatgataattctgcagagaattagaatttagatttaaattgtcaactcttatacatcctggcatatggtttaaacacatgtacacacacacaaacacctcctactatttactgaagagcagatatctgataacttaatctttttggttttgagtcaagacaattcctccttttgaaactgcataccgctgaatataataaaatgtaattaagattaaaaataagaaactaatgggagaatttcaatattgtctatgttcactttaaaattcctctacttaggtttactgccattaccaaagactattcaaaaatcctttttaggagaatcctaatggtttcctgacatataatcaaataaggactctgttgattggctaactcaatcttcctgtgccaaaaagcagagcccagcagagaagagggcagggacttgaaagtcagactgactcgagttccagccttggggctgtgggagcttgggcaagtgacttaacgtctctggctctcaggatctaaaaggatttccagtagtaatttggggtgttactgatacaggagctaaaaagaaattatttaggtggttagtgagggtcagagagtcctcggtaagatttgccttttaacaaaaagcagccccaaaatcatttgtttgctaacaaagagaagcctgtaaaattgagctgcagacatagataagcaagctggaagcttgcacgggtgaatgccggcagctgtgccaataggaaaaggctatctgggggccaggcatgttcaacatggattctccatcttcccttttctttgtcaaccaagtgtacagtaaaggaacaggcaacatggcacgggccaggtagagaacccttctgcataataaaagattagggtgagatggccagcttcttcccgtgctatgtaaatggcatacctggtccaaccagtcttttgggccctgtgtaaatcagacaccgcctcctcaagttagtctataaaaccccatgcattttaccgtgaaactgggagatccactcggaaccccctcctgcacgagagaccttttctcttttgcctattacacttccgctcttaaactcactgctcatgtgttagcatccttgatttccttggcatgaggcaacgaaccttgtgtattaccccatacaaatgatgctgcttcattactaatagcaacctgacagggttgtgttggggtataaattatctagaccagggagatccaatataatttttttgtaatgacgggaatgctttgtatctgcatcatccaaaatggtagccaccaggccagggtgaaatgtggccagtgtgactgaggaactgaatgttttccatgatttaatttaaatgtggccaatggctactgtaggagacagtgtgagtctggcatattataaataataaatattaatataatttgaactttggcatcagtgtttcctagatttgaattactatgcaagttgcttactgtttccaagcctcagctttctaatctgtaattggggctaataatagtatctgccttacaggtttgttcagaggataaatgagaaattgcatgttgagggcttaacacagtgcctggcacataaaagctctggtaacagttagccactttaataatttgctaataatggctatttcttcttcagattaggatgtgctcccccaaacagtgcacttagacatagcgggcaatccagctcactctctgcagtgagagagaagcactggccgaccagagtcagccaggggctcatgggtatgaaatcaacagcatgattttgtaagtaatggatggaaagggcctcacaactttatggcactgtgttcaatttgcttggtcttctgtagctccttttgaaagccttttagggtggattaacctgctaccaataattctggtcagatgtagactccatagctcaaagcaaactgagagagtgagggcagcaggccaattccccaccccttccttctggactctgacagaagcttacactcaaggaagagcaagtaggaattaacgtgttaagagctaggtaagcaaaacccaatgagaagttctggcaaagccccatgggcaggggtggcttaggcacaggaaacaagtaggatttcataccacgcgcctcagtctacttccggggccctcatcctcagctgtgcctatgcaaaggagagcaaccaataaaccccaccgccactctcctactgtggaggccagggatggccaggggtaagagagggatgggaagtgtttcctccagccgtcctctgagaaggagaggaaactgggcagagcttctgtcctccttcaagcagaaacagaaacaaaagaaacccctaagggggttcttacttcccctctagttcagttgtgcactaaccatctgcagctcaacattcagcattcattcattgattcagcaaacattgaaggagggccagctatgtgccagatgccaactcatgccatgaaagagagtccctgtccttatgaaattcactatttagagagaaaagcaagcaaaaaggcaaagtttgaaaagtactgttgaagtggcatcattgtctggggtgaatacctgaggtttgtggtctcacgccaagggaatcaaggactcaggcacacaagaagtgagtttaagagcagaggtttaataggcaaaagaaagagaaaaaagaatagctctcttgcctgcacagagagaggggcacctgagtggatcttcctgttttgtggtgaaatgcaaggcattttatagacgagcttgaggaagtggtgtctgatttacttaggacccgagagattggtcagaccaggtgtgatgtttacatagcatacaaagaagctggccatcccatcctaatcttttattacgcagacggggtctatacctggctggtgccatgttgtctgttccttactgtacacgtggttgacaaagaaaagggaagatgaagaatccatgttgaacatgcctggcccccagatagtcttttcctattggcacagctgccggcattcactcttgcaagcttccagattgcttatctatgtctgcagcccaattttacaggttgctctttgctagaaaagaaatgatttgggggctgcttttcattaaaaggaaaaccttaccaaggttaaaaagaaaaaaatttctttttaatgcctatgttactgtgaacagtgtcgggataaggctctgagagccagatgaggatgagttatccaatccaaggatgggggtctggaggaaaaaatcctagagagcattgctgcagttgaataaggattagttagaagctactgagtggagcataggagtaggaactcttatgcaaatgtgcagaggtgaaataaagcaaggtatagtccaggtgcctaaagtagcacagctgacttgagatagatgatagataggtagatagatggatagggtacatagatgatagatagatagatagatagatagatagatagatagatagatagatagatagatagacagacagacagacactggtgtgagtgtgggtgtgtgtgtctggctgcgtgcatgcattcctcctgcaggagatcaggagcagtgggcagtatggagtgacaagaagattgggaggtactccttctagccctcccctctgctctgccctccactggagcagaagcaaagcatatggtgaaggggaacaaggagtctccccagcacagtacccgagtgcattagctatttatcactccacagtccccattcacgtgttaattcagcatttattgaatgcttactgtttgcaatgtctatgtcaagctgtcaagtgtagtttttattctacaggccacaggcaccccctaactgtgttaaacaagatggtagtattgagacaggaataataagggtggtcacaggagaatggaagattccaggcagcagtttgactagtaaaaaaggaaactgttgaaatagctgcataatccaggggtcaataagaacctgagaaccagggtgtgagccaaggctggttaaaagcaactggatccaatatggtgctgagtttctcctaggttttgcctggaacctcattatatgctcaataacataccaaatcacacacccaccagggccattccatttcctggaacactcatgtttggtgtaaaaatgggtggcaccacagctctgagaaatctttacctttttcaggaaacttcatgaatattccatcctttggttaaagaaacccataatgtagaagccccaaaccctactgggcgcaactctctctctcttgagtatgcctgcacttccctttattatttatttatttatttattatttatttatttattttttagatggagtctggttctgtcacccaggctggagtgcagtggcgcagtctcagctcactgcaagctctgcctccagggttcaggccattctcctgcctcagcctcctgagcagcagggactacaggcgcccaccacaacgcctagctaattttttgtattttcagtagagatggggtttcaccatattttattttatttttgagacagggtctcactttgttggctcgctgcaacctctgcctcccaggctcaagcaatcctccaacctcagccccccaagtagctgggaggacagacgtgcaccaccacacctggctaatattttgtatttttttttgtagagacagggtcttgccatgttccccaggctggtcttgaactcctggactcaggtgatcagcctgcctccaccttccaaagtgctaggattacaggaatgagccaccccacccgaccacactcccatttcttgagtgtgtgcattttgctctgcaataaatctctctactttcacttttctctgactcgtccttgaattccttcttgtgacagcgtcaacagcctggacaccaggtgcagtcaacgtctcaccagtgtttagggacctcccctaatccactggtatcagcatgatcagacttgctttttcagaaaaagccttctgtccatagaccaaagggaagtgactcagagaaggggcaggaggaatcacaagctccctgcctgaccaggcctggactatggcagagacagtgagatggtgagaaagcaagggtagacagccagccaaatccagaatatagaaagttctacaggaaaaggtggggccaaggtgggacagggggaaaggaattgttgcacattaacagtgcaatgcagagcactggtcttgtttatgtccaggttagaacaaaccaatgagaaagcacatctttgagaaaactggagaaatttgaacactgactagatataatattatgttaattatgctttaatttggggtacaataatgcttttgtagctatttctaaagagtccttatctcttaaggatacactctaaaatactagtggattaagttatatgatgtttagactctttttaaaataatccagtggggtgagaggcagagggaagggagaggagcatagaggaaacagtgttggtcatatgtttgtaattgttaaaactgagtgatgggaatatggagatttaacatattaatactattttctgcccatgtaatatttgaatattttcataataaaattgagagagagataaagaaagaaaagagaaaagaagagaagagagaagagataagggaagtggaggaaaaagagctttcttcaaggaccattgtggtggacacaaatgaaagatacccccttcctactatgaattctaagtgtgtactacccaagatgagtcaatcggatcctagcttccagaaatcgtgagcatgatgcagccctacagacgcagtgccctggaaaggagacccatgaccatccaaggaagatgtcccatcacagaactgccctgggtcatgtgttttccaagtccacatgtccggtagttccttctttcctatgaccaatgccaccagtcttccagcactgtcctttattgctaggcaaacctgagccatcctcttcttcttgcaacttgtgcctgaagtaacatggacacaaagtccccacttttcccacattctcagaatgaagtagttctccctccacactttaggtgctagaggcaagtggattgcttgagctcaagagttcaagaccagcctgagcaacatggcaaaaccccgtctctacaaaaaatacaaaaattaactgggggtggtggtgtgcacctgcagtcccagctactcaggaggcagagaaggaggatttcttgagccctgaaggtggttgtgttacgtgcattcatgttaagagaccaccaaacaggctttgtgtgagcaattaagctttttaatcatgtgggtgcaggcagactgagtctgaaaaaagagtcagcaaagggagatagggatggggcggttttataggatttgtgtaggtagtggaaaattacagttaaagggggttgtcctcttgcgggtacaggcgggggtcacaaggtgctcagtggggagctcctgagatttattgtccaggagaaggaatgtcacaaggtcaactgatcagttagggtggggcaggaacaaattacaatggtggaatgtcatcagttaaggcaggaactgggtattttcacttctttgtggttcttcagttgcttcaggccatctggatgtataagcgcaggtcacaggggatatgatggcttagctcgggctcagaggcctgacattcctgtcttcttatattaataagaaaaacaaaacaaaatagtgatgaaatgttggggcagcgaaaatttttgggggtggtatggagagataatgggtgatgtttctcagggctgcttcaagcaggattaggggtgacacaggaacctagagagtgggagagattaaactgaagaaagattttgtggtaaggggtgatattgtggggttgttagaaagagcaattctcatatagaatgattggtaatggcctggatgcagttttgtatgaattgagaaactaaacggaagacacaaggtctgaataagagaaggagaaaaacaggcattaaaggactaagaactgggaggacccaggacatccaattagagagtgcccaagggggttcagcataattatttgcttggttggtgagtttttggtctccatccttgagttttttttatgttgtcatatgccaggccagattgatttaggtaaaaacaacactcttcatttaaaaatatacagagttctcctttctcagcagtgagtaagtcaaggcctcagcagttttggaggaaagagaaatgcaaaggaagcaattgtttgttaagaaggattagaaatggctaggagagagtgagtgagattgatagtgtggtggagatagctgaggagaggtagagggtggcataagaatgggaacgagaataagagtgagtataaaagtaaagaatagaacttcatcagggtgaaagtattggagggtgccctgtcagcaaagatcatctgtccactccaagagggagtcaagagtggcggattggggatagtaccaggagatatccactatgatggtttggaggaaaagtgtaaactggcagtgtaaacaggggcagggcatttatgagtcattgagaatggtgaataggagtatgactagacagaagatagtggagatgacaaattttgggggcacagtccaaatagtgggggtgactgcgtagagctctgttgcaaaaagtagggtaaggataaatagacttaatagaatgaagagatgtattaggctcataagggttattattgttcttcagaaatgcgagtgagtttaagggaagtaggggtgagtacttgcgacttccagaaggaagaggagagatcaggctggctgtctgatgggcacagctttattctggaacagtgaatccaatggggagggtcgtgcagacggatggcagttggggtgctataaatgaccaggtagggtccagtccatcaaagctgtagagtgtgaggggtcagacttgacaaggactgattgcccagctaaggtatcttcacatggctgggagtttggaggaggcaagagaagattagcagcctggcgaatttcctgtctagcctgctggaggactggaagataaaggcaacaggtcgtgggcctggatcctgtgtgaggactctagcagcacagccttgtatttcagctgtgtgtaaggaaaaaggatgggacgagtcggggagtgctagtgtgggagctgtctccaggtcctttttgagagagtgaaaggaagaatggggaaaagacttatggtctatgggattagttaaattaccctttgtgagctagtaaagtggtttgattaggatagcaaagcccggtatccaaagttggaaatatccaacaatgcctaagaaggaagggagttgttgtttggtggtgggggttggggtctgggagattaactgaacagagtctgcaggaagggtatgtgtatgttgatggagcattataccaagataggtaatgctaggggaagaaatttgtgcctcagagggcaatactttgtacccctttgagtaaagatgttgaagaagcaggctagtgtcctgctgggaagattggtaagaggggctgcaaagaagaagatcatcaacatattgaataaggtgggaggtagatgggtgaaaagaaagcagatcatgagaaagggcctggccaaagtaatgtgggctgtccctgaagccttggggtagaaaaatccaggtgagttgttgggactggtgggtgtcagagtcagtccaagtaaggcaaaaagaggctgggaggagggatgcaaggggatagtaaagaaggcatctttgaggtcgataacagaatagagttgtggaagggtgtattgaagataggagggtgtacgggtttggcactataggatggatgggaaggacgatttgatcaacaagacgaagatcctgaacaaacctgtaagacttgtccggtttctggacgggtaggataggggagttgtaaggagaatttgtaggctttaagaggccatgttgaaacaggcaggtgataacaggctttaacccttttaaagcctgctgtgggatgggatattggcattgagcggggtaagggtgattacattttaatgggatgataaggggtgcatgatcggttgccaaggtaggagtagaggtatcttatacttgtggattaaggtggggagatacaaggggaggatgtgaaacaggtcttgagttgggtaaaagtgcagcaaagagatgtggctgcagcccaggaatactcagggaagcagataatttggttaaaatgtctcagcctattaaggaagctggacaggtggggataactaaaaaagtgcataaaagaatgttgtccaagttggcaccagagtgggggagttttaagcggtttagaagcctcgccgacaatacccacaacagttatggaggcaagggaaacaggcccttgaaaagaaagtaatgtggagtgggtagcctccgtattgattaagaaggggacagacttaccctccactgtaagagttacccaaagcatctgtgatggtccaggaggcttctgaggtgatcaggcagtgtcagtcttcagctgctaagctgagaagatctgggaaggagtcagtcagagagccttgggccagagttccaggggctctgggagtggttgccaggcaagttgaacagtctgatttccagtggggtctcgcacagatgggacattccttggcccagtggccagatttccggcacttgaaggaagatcctgggggaggaggtcctggagaaatgcctggcccctgcagtttaggtgttttgaagttcttgtgtgctggagatgtggctggggtttctcttacagcggaggcaagtaattgcaactcagaaatatgttgtcacttggctgcctcttttctattattgtacaccttaaggcgagggtaattaaatcctgttgtggggtttgagggctggaatctaatttttggagctttttctaatgtcaggagcagattgggtaataaaatgcatattgagaataagacggccttctggcacctctgggtctagagaggtaaagtgtctaagggttgttgccaaacaggccatggactcagctgggttttcatatttgatgaaaaagagcctaaacgctaactgatttgggagaggtcagctaaagaaaaaggagcattaaccttgactatgcctttagctctagccacctctctaagaggaaattgttgggccggtgggggagggctagttgtggaacgaaactgtaagccagaccaggtgtgaggagagaaggtgaccaaaggtttatagggtaggggagcagaggctggggaagaattgggacctggctaggcctagcgaggaacagcctggggaggaggggagaaatcagatgggtccgtagaaaaggaggattcaaaggactcagagcttggggtggagactgaaggaacagacaggagagaaagaggaaagatttgggatgagtcacattgggagcagagactagagagggactgatgtgtaaagaatgcctggacgtcaggcacctcagaccatttgcccattttacgacaaaaattatctagatcttgtaggatggataaatcgaaagtgtcattctctggccacttggaactattgtcaagtttgtattggggccaagcagtattacagaagaaaataagatgtttaggtttttaaaagagtgcataaaagaatgttgtccaagtccatgcccttcttaatcaatatgggagctacccactccacattaccttcttttcaagggcctgtttcccttgcctccataactgttgtgggtattgatggccaggcttataagccccttaaaattaccccactctggtgccaacttggagaggtcaggtgttagtcaaaggtgttttaagttttaagaacacaggctaagggagaagaagggggaatgaagcgtggaaggttgcccatagtgaaagaggtaagtttaaagagaaaggtagagacatggagaaggggggaggtgagcagccctgggctgtcatgtgggttagcagccaaagctggtgtcccagcaattgacttaccaccaagggaatgtgggtgaatgaccaaggcaggcatccccccggtgatcagacaccaaatggaatgtgggtgaaagatcaaggtaggtgtccccatgatgatcagacaccaaaggaaggctgtcttcccaaatccatgatccatgttggagtttttgagttcatggataaaatgtgtctcctttgtctctactagagaggaaaaagaactggaatttgaaggacagggagattgaagggtagggagagaggctgaagaagagagtgaggagaccgcttacccggtttgaaattggtgagatgttccttgggctggtctgaggacctgaggtcgtaggtggatcttctcatggagtgagggtgaggagaggggaccaatctcccgaaggagtcaccctgtccggggtcttcggcaccaaatgttatgcgcatccatatgaagagaccaccaaacaggctttgtgtgagcaataaagctttttaatcatgtaggtgcaggcagactgagtctgaaaaaggagtcagcaatgggagttagggttggggtggttctataggatttgggtaggtaatggaaaattacagttaaagggggttgtcctcttgcaggcaagggcaggggtcacaaggtgctcggtggggagttcctgagactcactgtccagaaggaatgtcacaaggtcaattgatcagttggggtggggcaggaacaaattacaatggtggaatgtcatcagttaaggcaggagcggcctattttcacttcttttgtggttcttcagttgcttcaggcaatctggatgtatatgtgcaggtcacagaggatatgatggcttagcttggactcagaggcctgacaggttgctgcagtgagccaagatcacactactgcactcctgcctgggcaacagagccacaaaaaaaaaagaaaagaaaagaaaagaaaaaaaaagaagaagaaaaaaaaattttttttccaccaagaatttagtaaaaaattatagggaaaagtgtcactaattcaagggaattgcactgaaaattattcattcattcaacagatatttattgagaagcaagtatgctggtgctagggttacaacagcgcacaaattcttgtattcaaggaatgaggtaagagtatgcagataggagccagagaggtcaagaggcaattgcaacatagagtgacacgtgctccagaacacataggagggcttccaggccccatgctgggctatcagagctggcttcctgcaggtggtgtggctcagctaaaacctgagaaccaagaatgagccttctgatatctcagggttaaatcggcacaaatgaaaccattttataaccaaacaacattttccctcctgaactgcactttttctagaacccatttaatccttcctaacatgttcaatccagccccgtgatttttcagtcaaatgcaagatgcgtaggattccttttctgttcagtgctccccagccaatctttttcccttctcccaccccacagttactaattccagcgtttcagttctcagcagaggatgacagttccaccaggagacatcagtgttatctggagacattttagttgtcccagctgagggcacagtgctgctggcatctagtgggtgaaggtcaggaatgcacctcaacatcctggaacactcaggacaatccccagcaacaaaaacctacccatccagaacatcaacagggctgtggctgaggagccctgctctagtgcttcctccttactgtatcctcatcaaggagggctctggggcatgtcaggggctgctacaggctcctggcagatttcggcgacttactccagacttgtggaacattcaggattcttagcatggccacaggagagtcaggctgtccacaagcactctctctttcttcacccactcattcctgtcactctaccatttccactgccttcccaaatgcccatcgtgagtcccaccaggggccagaacaccactctctcaagcctccccagtggcgcgtgcacacctggagaacatgtctcacatcccccagccagcgagacgtcctgagattccagcacttctcagtgtctttcccagcttgtttgtatctggaatggggtggggtctctcacacaggagaaattacaaggaaaagtgtacgtgacaggaatggaggaatttctgtggaaacggtgtgtgagaaaatgtaggaagaaagaaacttcaggaaatggtaagtggcatcttgagagcagaaagtgagaagggagcagaaagaaatggggctggaacctgggaaggagaggacaggtggggatggccttgcacaccgtgggcactgaggagtgtgggcccatggcatgggtggagaggagtttcaagatagggagtagattcctattttgaacttcggattgcccctggcgatgtggagactgtattggaagaaggcaagaatggaggagagcccctaggtggaggtttggcaatgctctctccagaatatagcagaggcctcttccaaggtaggaaagccctgactggagagaagttaatggctctgagggctcaagggaggacttggattatcaggacttttagggaggcatatgatcaaggcttgggtcttggcccattgaaatggggagcactggttttaggatgtgggtcaattagtttggttttcaggacaggctgagttggatatcctgggggacctccaggtggcagtgtcaggggaagctggatgtgctgacactgaactcagcagagtgactgagtagagatcgacatctggggtcacaggcagtggatgccgtaggggtggactcaatagctcaagcagaacccggaggaatgcaggcagcaaagggagccctaaagaacagtgaggagatgtgccaagaaagagccaaatccgggggattggctgtgggagagagggctgtgggagtaagaggaagtgtcagcaacgtcaaatgttgcagagacatagagtaaggtaagagtggaaaaaacatccatggaaccctgtgatgcaatcggaatgcagaaagactttgtaactcctgcctggtctcctcctctgcccactcatggcaaaggaatacaaagtaatgttccctccttccgcctagaaaagcacaacttctgcccccaagccctgggctctcctgagaggacaggaccagcctctgaagttgaaggtcctggttctgcccccaagccctgggctctcctgagaggacaggaccagcctctgaagttgaaggtcctggtttaccagatagggaaggggccctttccaagaccctttccagaaggtgtggctgagatgggaaccgtggactctgtgcagatgtaggagctggctccagtcaagtgctaggaggttgtgggtcctgggaaggaagaggctctggagcctctgtggagactctgggactgtccttgggggagacgtgagcaggaagaagcagggccttcacagtccccagcttaggggcctcaccacccagactgaagaccaggaccaaaccctttcctgcacagttacaatgtgtcatttaattttactaaagggaatattttttaaatgaggatgctactttgtgtattaatttttacctctattcataaaagaaacgtttcttatctatttaagatgattcatatcagaccagtgtctgcccaactcgactgaccctgtgaaaactgggcacttcacactccaatgatgatggatgagtccccagcagcatagtttaagggagtgagtgggcagtgtggcctcctgtgcacgtgacttcctccttcagtgtgcccacatgtgggttccacggtcttgtgacattgtggctttagaaatttctgtttccattttctatcattcagagtaaatgaaatttgcaggaaattcagaaccttccacctgtacagtggatactgtgagactctgcccagatgcccttttcaagccaatgcatctctccatgctcccactcccatagatgggaacagaggtgctggaactcagatctactcccctttctgggaactggagctgcctgcccaggcaatgcccccttcccagggatggctgagccaatgactggctaatgttggattgcagaggcctagcgccctcccctcaattcctaattccttgtaggaataactgaggcctcctctgtgaccacgtgggcagcttctccctctgcctggtcctgtcttgttctctcctttccaattgtgtctcctggaagccctccccacaagtctgctgcatacaactctccttctcagagagcctgagccctggattcccaggaatccagcctaaaatagtctggcatttggtttcaattttctctttcactaagactcagtcacaggtgctaataaataataaaatgtcaccaccttgaattctatcactctctcttttcttgccccatctctgacaagtaggtggtccctcaagaacctgaaaagcagacattaggaggaaaggaggagtgggggcaagaggcccacacctcacctggccggctcccatccatgcgcccttgactgaggtaacacctaccctgggaatccttcccctgcctctcgtgagccaggccgggtgctcttgggacagctcccactgctcctgtgtgctcccccagcttggcacatgactccctgaattatagtcagttccgtacctgaatctccctctagaatgccagtgccacgaggacagaggacggttccactttgttcactattttctccccagggtctggcaaagttcctgggacttgggagaggtgtccttcaggagcttggcagaagccaaacggcacacttaagtagggcaactgaggtgagtttaatgaaggattctatacaaaaatttggacaaggtatagggaggccacaatacacagtgcagtgcctggtgccagtgagagcagggcactattcccactgcaaggccagacagggcaaggggagggagctgcctgacaagagctgcccttacgtcaagggacacatcagcccactagaccccatcaggagggagccagggcctgactcccctgaccttgctctccaatcttctgcctaaaattccccatcagccaaacacaactgaaaactgaaagacaggggagcctgctgttaataaggtgagcatcccccagaataaagctgggtagagagtggagaatggatatggaagggcaaaaggaagatttataagacagtgggcactaaatatctatgagatgaataaaggaaccacattttacaacaaacggtcattgaaacgctactcaatggaaagagatcatttcggtcactgtctggtgcagacaaatcaaagcccacatgcatcaaaaaggccatgtccgtgtaactccgacacggggcagacagcaaggctgaagcctatggggtatgtggagccggaactgagagatcctgatgtaaatctagcacttgggaaaagggggactagaagaaattcacccacaggcagaggaaaacacaaacacttatctatttttgcctaggctttaagtggtatgggaaaaatctctgagactacaaatcctgtgcttcatgcacaggtttataataccctcaaaatggaagaccccaaaacccaggcgcggaaaattcatatcaggccattgatgccctcaatgttcccggctgaaacaaactcaaaactcctctggaaaggagtgctcccacttcaagccatgaaaagctactgcagagaaaataatccccagtcaagacacactcacattgaaactgcaaggcacacaaggaaatggatcaccttgagtgatagctggcagagctaataaacctctgtatacctctaagaagctccacgcactagtataacccttaaagatttgatgaaatcattactttattaaaattgtttttataaaaaatcaaaatccaaaaaaagcaacaaattttataccagagccaattcggtatatacaagggtgtcttactcttttggaatttgtcttattgtcctaactcagcacattgtcctggtctatgaaaagtcctagaaacccttctaccctctgtaatgtaggagctttaactcaatagggttttttaaattcttttttcttgtctttttttcttttttaattttttccattttttcaagtcaaactgaagaaatatttttcttttctttctaggaatgcatattcaccccccaaggccacttgtctcctgattggagagtattagacaattctcaggatttctttattttccttctttattccataggattgggaaacccagtaggattgggtttaggcatatctctaaagcaccatgtttcaacgttttgatgtaagattgtgccctatttcttgttcagttgctgccagcagatgttatagttttaaaactagtttttggtcattgagatattagaggagggaagagtctgctatcctgctttactcatcttcatctacactacactgtcatcttcactgcaaagtcctgtattaatgtttttagattctataacattttaacaggtgtcaaaaaatcttaagcaccacttcagcttgggaatctctaaatgtaatggtgtttgtgggctggactgatgtctgcgtcttgttgttgttattgtctgtagtaatggagagccgggagatcctggacacttcctgttcatgggcacttgatgcattagctgccccagcagctgattacatttaaacaaggatgtgtgggtgaacccagggagaccaatctcagtggaatggtgggggcagaagccaggctgcagggtgtagagtagggaatgagcagtgatgaagtagaaacagagtttggacaactagtgaaactgcctggaagagggggagaagagacagtaaatggtctgaccaatgtttgaggtcaaagtgggtttgtaatctttatttaagggacagatctgagcatttaaaaattctgaataatctaatagagaggaaaaagttgggactcaaagaaaatgtgggaaaaaatgatgaaggttaaacggaatgagatccagagtgcagggggagagattagcctttggtgttagaggagcaactctgtccatggagagaggaaaaatgtagacataccacagttgcatttgaagttggggcctgaggagttgaggagttctgagaaaagcagaagatgagatcatttcctgagagtaaatgggagtcattagaacgggggtgaagagactggaagctttaggtagcttgaaatagttgatggaaaaattggataaagtgacaatttgtcacactcagaacagctatcagggaatctagaagaatctctggaagctagttgaagatcttaaattaccaatgtatcttgtccacatagctaagcggttttacttatttttatttttttgaaacagggtctcactctgtcacacaggctggagtgtagtagtagtagcacaatcacagctcaatgcaatctctgcctcccgggctcaagcaatcctcccaccccagcctcccgggcctgggactacagacacacaccaccactcccagctatattttgtacatttgtagagacagggtctcgccatgttgcccaagctggtcttgaactcctgggctcaagtaatctgcccacctcggcctcccaaagtgctgggattacaagcttgagcccggctgctaagtggttttaaacagctgttctcggaaacacacactcaaagaaaaaatgtagaggataatttatctaaggctggggcttcaagagaggtcagggtgttgacaagagaatgactaagtggcagactactggatctcagctagataaagagggatgtgatcgtgggaggggctgatagtcagaggctggaaggcttgatgaacaacacatattacacaaagaataaatggagtgagagaaaccaaaggagtaaaagttgtcatcagaaaagtgagaaattttattgtgagaattcagtggtaaatcaatgttaacaaacctcagctgggcactagtggagtgaaaccgaaggccagggagttgagttaatgagctgagacttgggcaccagatgggggtccacatggacaactaagccaccaggatgatgtgggaaactggggtgaatagaagccccttatccatgtgcacaagtcttgaataaaataggggcaaccaggcagtcagtggatgatagcagtgaggtggagcagagagcaatgtagttggagaagtggagcccacagcagtctcctttatatctagaagggaattaatagccaaaaaatggcaccgaggccaaggatgtcaccttctgactcccaaatctgagacagatgtgagagggaaggagtatcctcaagggacaggagatggtgcgaatgtttttggcataaatcaaagatgtcagggaaattgtcagaattcaggttccagagacacagaggaaaagcgtgggagaaagtggaatattgggaggtgagattagggcagaggaagcacaaatcaaagaacgaggaatagaaaaagtcatatgagctgaggagttggccaaacatgacagaatgggaatatgatggaattaagtggctttatgtgttccaaaaggattggtccacgcaggccacaggaaaatgggaggtaagaagaaagggatcgaaatgctgcaaagtgtattacttcatggtaagcaaaggactcaagactctagaaaatgatgcccttccttccaagactatgttagtccaaatctttcaagatacagaacccaaggtggggtctggcatacaagaagtataatagaggaaatgtctgtgacatttgcaggactgcaaagggagccaggagaagctgggaaagccatgagatcacaagcaggtctgactccaagtgaaggagatggggaatgacgcaaggtttggctgaagcatgtgccaaaggcacccatcagaggagtccctctccaagggatgggcctatcatagtgtccctaatagtgtcatggagtgggagcagcccacggagggcacagccttggcatgaacgcagacatgggtctcagagtgcagcagctgggcccctcagtcaattaggctccctcagagctggggcaggaggtgcactagaccacacagtaatatttatttattattaatttaattaataatattaatttattaatttaattaataatatatttatttatttattattactagaccacacagtagtatttgtatgtctaaggaagcatttctcagaatatactcactgaacttttagcctataagtacctgtatgaaaattttaaaaggggtttcatgatcaaaacattttgggaaacactccataccctttcttcctcatgaaggatcataatgcctattagtatatgaagggctctgagaagtcctgtagtaaagaaacttgctttagttttttagtccagcaatttttcaaacttaaatgagcaatagcctcccatccttttttttacactttttagcatactgcggaataaactcaacatgcattgagaaagactgctttagggaatagtcaacactatttcactcccagtaagtacatataaaatctgtatttccagggtggattatcaacacagctgtattttagaaatattatctgccctcccaggtatcacagctactaattattgggtactgaggtggaattttagggatcagccaattatgggaaagaaaatctgggggcaggataagatggtctccgaagccttaaaattatatgccattatttacctctttgatctactactcaatatcaaacaactaattcagaagaaaattgattgttttctaaaagtagtttttctacatttcccattaagaagcagtggtatttaaaacttataatggctattatgtgagattatcactatcatagtttttctctatacaaattttctgtaacattttatttgctaataaaaattagatagatggattgactaattgataatctaagaaagattatatttgaagaagccatagtaagggacagattaaattatcatcagtctaaacattctaatacctatttctctttttttgaaattttccaaatttgttattatgcatttaaacaataattttttgaacttttattttaggttctggggtacatgtgaaagcttgttacgtaggtaaccttttgtcatgagggtttgttgtacaaattatttcatcactcagctatcaagcccagtactcaataggtatcttttctgctcctctccctcctcccgccctccagtctcaagtagaccccggtgtctgttgttcccttctttgagttcatgtgttctcatcatttagctcccacttataagtgagaatacaaggtatttggttttctgttcctgtgttagtttgctaagggtaatagcctccagctccattcgtgtttccacaaaaaaacatgatctcgttcttttcatggctgcatagtattccatggtgtatatgtaccacactttctttatctaatctgtcattgatgggcatttaggtttattccatgtctttgctactgtgaatagtgctgcaatgaacattcacatgcgtgtgtcttcatggtagaatgatttatattcctctgggtgtatacccagtaatgggatttctgtttttagctctttgatctaatacctatttctcaagatcaagttagatctctaaaaaaggcatcatcctagcatttccccatcccttccctgaactaaatttaatgttgtgtgtatcaatcagcatacagtcaagacagaaaccacacatgaacattaaatataatgagttattaacttataaaagggtatgaactactaaagggggtaaggagaatgctgaagaatgcaggaatggcagatgtagagagcagccataacctctaagctaaggcacagcagccaaggaaggggcgaactcaaaaaatgccctccctccccagctgatccacccttgttggagggggtgtggctgcaacccaatggatgcccaagaagtttgcagagttgtggcaggttggggctgctgagcaggaaactgcccgaaggggtaccagtgagattcccaagaatgtgggcatgcctctggcgaggaagacgctcttggagtgccagcaaaatttactaggaagctacccagtagggtgccagcaaaagtcagcaggaagccactgtcgtggtgtcggcaaaattcactgaggagtgggcactgcagggtctccacccagcactggcaaatcagccaaaagaacaaaaacaaaataaaaacaaatcccagaaccagaaagaaaaaactctgcctcttactgcgaccctcttatgccttctacagcaactggcaaaggagaaatgtttatggggtccagctctagactcacaaagcagaacacagaagagtgaatgaagagctgaaaggcgataaatcagtaactggagcctcacatcctttgccttttttattgagggtcaatatattaagaagaatatgtctgcgtcttcggtaaaattattgctaaggttatcacccagtgtgtgttttcaacctccctgatataagaacttagtgacaagaaagaatgagacaatgatcatgaactattggacccaaccatttgtggctttagtgcccatcttctcagcaaggctttctctctctctctctctctctctctctctctttttttttttttttttttttttttaagatggagtctcactctgtcacccaggccggagtgcagtggcacaatcttggctcacggcaacctccacctcctgggttcgagtgattctcctgcttcagcctcccgagtagctgggattacgggcacccatcgccacccctcctggctaatttttgtatttttagtagagatgaagttttgccatgtcggccaggctgttctcaaactcctgacctcaagtgatccacccacctcagcctcccaaagtgctgggattacaggcatgagccaccacagccagctctcagcaaggctttttctgactacactatttaaaatgtgatccctgagccaccttggcctctcttgctgtccttccctgcttcgccttctccatagcacttctctcctactaatctacaatttacttgagctctgtgaaggtcaggatttttgcctattttgtccattggtgcatccccagcacctggaacagagctaggcacaggctaggcactctagaaatacttgctgaataattgaattaagtaaatgagtgatctacacgtagtggggaatgagagtatacagtgatagttccttcgactaaaactggggtcaaattatagtgataaagaggaactcagaccttcagaggtaagctttgtggaccacttgccaaggctgcagaatgtgatgtcgtttcacaaacaaggaggccctattatggcttcagatatgagaataataaagagaactttcctttcgcctcaactgcagccttctaaactcttccttccttcctatgtagaagtttcaaggacctcatggcctgagtgtggataggcagaatgctgggaatcaggcaaaaataaaataatactgaaagtgaaggtcatgctaatattagtaagccagggtgatcctgaatttacaaaacatttttctttgggaaatttcacacctcacatgattctgtgtttttacttgggaaatttcacatctcacatgactctgtgacatgcggtacatgaggtgcctgactgctgtttttgtcctctactaatgaggaagagtgtgcgtactcccagcgttttgcaagtttcaaagtctgacttgactttccttccttttcctggaactgatccatgagtatcgagagtaaagctgcccgcacctactcattcaagatcctgagtgtcctgcccagctgcaggaggtggagagacccaggaggaggggccactgctgatcccaggctgtagggggtgggaagagtgtcccagggcaccatgacccccactcactcactcacaggagacccacacaagagaggagagggcacttacagcttaggttcccaccagcaccaactcctctgccatcaaacatcattgtgtttctctttctgccttgtctgtcggcacacgtggagttaaatttaatgctcaatcacatatttgtctgggctctttctgtgtttatttttctcttaatagttctctctcctcccttcctctccccgcccctcctcctccttcttcttttttttttccagagacagtgtctcgctctgccacccaggccagagtgcagagtggcatgatcatggctcaccgcagcctccaactcctgggctcacgtgaacatcccaccttggcctctggaatgtctgggattacaggcacttgccactgcatctggctaatttttatattgtttatagatccgggatctcactatgttgcccaggctggcctcaaactcctgggctcaagcgaccctcccacctcatacttctgagtagctggggctgtaggaatgcgcctcagtgccaggctagtttcttaattttctatttctattttgacaggtacaaattttgtattcaatcctacctcagacacatctttggtgggaaaaggatgtcatttaatcaatatataaattctaagcaaataggtctgatccccaaattaggttagtcacagctgctgagtcgttgacccaagagaagctcatctagattttttcattattttcaagttcctcttctcggttcgtccttcttccagaccgtgccctccccgtcccactctcttcccacagcctcccctccccacagcctcctcccaccattccaaatctgggctgttctctcaatttccttctctctggactcaaacctaccctagcccccagcctcagtttggggttaaacttgtcctcctcacattctctcccacccaacttgatgtcgcctctgtgtcatcaccacgggattttcctcctctgggttctccttttccgagtggggtcagctcccccatgagtcacagcaccaatcacttctggctgcttgcaaacccctttgctttcctcagtgttgacacccagggcagccctatgctcactgccgctgagaccccacctctgcccctggccttttcccagctgacatcaccctgtggcttccattttcctaaaattctcttttgaggcctcagtcttaaccaaagcacacagtgcccctcaaaaatgacaataaaaacccaaacacaccgtgactgtcatggcaggttcctggtccccgtattgaatcagcgggtgggtttctgcgaacactggtgagaggccgcattagagggtcaggaccctcaggtctggactcgtggtcaccacataccttcctccctgctgacagtagctggtacctgttacctactcagagtgtcacatgccacaagccagagcgtcttggcagttctcagcaccttgacatcacttccttgctaccactcagagcggcagtgacacagttcccttatctcagaaggccagaagacggctgtcaaaggtcacagggaaatcaaaggcggggtacagggccagagggaggaggaaacaacttcccggttgctttcagacgcttcagagatcctctggaggcctgggggagcttttgagtactttatttcagttggtccctgagctcggtgagtggggcgggtagagccaccaggggaatcaacagtggtttctcgtgcccctcagggtcaggagcagtctgatcaaaaggagggcatccactgtccggggccattcccacagctcccggatgctgggtctggaggctgcgcccttcccctgcaggagctcagcccagtggtaagtcatctgtgtgtcatctatgtatttaaccccttatggccatgttgatgctgagcatggtttcacttttgcaaacatttatttatacccttcgagagaaaaacgtctcagctgtcacaggaagctgcttcggggggtgagcaaactttttaaaatgcagaaattatgatctacacccgtttcttaaaagtaagccatcgtacttggttctctttaattatatattttcttacatattgtgttcatgtaggcaagtcctgtttctgctaaaagaaggtaagttctaccaaggcggtgtcatgccagctttatttcccgtggcacctggcacactgctaagcacttacatgcttaacaactagattgggaatggtgctgctctggggaagtgggcacacgttaaagaaatgtttatttcagtcttctgaaatagggaattactctggctaaaatgtagctccagaaagggaaagtggggctgtatgaatccaggtccagtttgttgtttcctccaggataaggcagctgtcggaggggaaaatcatctcccatttctccacagggcagtctgaagatggccaattacacgctggcaccagaggatgaatatgatgtcctcatagaaggtgaactggagagcgatgaggcagagcaatgtgacaagtatgacgcccaggcactctcagcccagctggtgccatcactctgctctgctgtgtttgtgatcggtgtcctggacaatctcctggttgtgcttatcctggtaaaatataaaggactcaaacgcgtggaaaatatctatcttctaaacttggcagtttctaacttgtgtttcttgcttaccctgcccttctgggctcatgctgggggcgatcccatgtgtaaaattctcattggactgtacttcgtgggcctgtacagtgagacatttttcaattgccttctgactgtgcaaaggtacctagtgtttttgcacaagggaaactttttctcagccaggaggagggtgccctgtggcatcattacaagtgtcctggcatgggtaacagccattctggccactttgcctgaattcgtggtttataaacctcagatggaagaccagaaatacaagtgtgcatttagcagaactcccttcctgccagctgatgagacattctggaagcattttctgactttaaaaatgaacatttcggttcttgtcctccccctatttatttttacatttctctatgtgcaaatgagaaaaacactaaggttcagggagcagaggtatagccttttcaagcttgtttttgccataatggtagtcttccttctgatgtgggcgccctacaatattgcatttttcctgtccactttcaaagaacacttctccctgagtgactgcaagagcagctacaatctggacaaaagtgttcacatcactaaactcatcgccaccacccactgctgcatcaaccctctcctgtatgcgtttcttgatgggacatttagcaaatacctctgccgctgtttccatctgcgtagtaacaccccacttcaacccagggggcagtctgcacaaggcacatcgagggaagaacctgaccattccaccgaagtgtaaactagcatccaccaaatgcaagaagaataaacatggattttcatctttctgcattatttcatgtaaattttctacacatttgtatacaaaatcggatacaggaagaaaagggagaggtgagctaacatttgctaagcactgaatttgtctcaggcaccgtgcaaggctctttacaaacgtgagctccttcgcctcctaccacttgtccatagtgtggataggactagtctcatttctctgagaagaaaactaaggcgcggaaatttgtctaagatcacataactaggaagtggcagaactgattctccagccctggtagcatttgctcagagcctacgcttggtccagaacatcaaactccaaaccctggggacaaacgacatgaaataaatgtattttaaaacatctatttaatgtattttaaaataatttgtaagttgattttaaaaccaatttaactacattccaaattatagacagcccatttatatgggagtaacttttcaggctcattgcctcgccggtgatgagaagaactagctagctggaagctgtgggaaaaagaggtaaggtaacttgttctgtcgaagttctctaaattctcttgcttacttgccacacccctaggcccccagcttcccctaacccaaggtttctggtattttctcgtactttatcaagactatggaatcttaggagacttaacaaaagcaaatgagaaattatgtttagaaatgtctaacaaaatgaatgctttgtccttttaagtataacacatacctcaggcctcaccagcacataactacaaaaggttgtcccacttcctttctgtggctgagttagtagaacacaggctcccacctgccacatcagcagaaggtcacctcaacatgtgagctacctccccggagaccccccagatccgtaaggatgatgcatccttgatcctaaaaacattttcctgttcctggtgttcagaattggactccacactcactggtctctttataatcttgcttctggccctttgaggcctcaaagctaccagggccttgctgccaggggacaatcaccactcccggctgagtcctgcagacatagggcctgggctggctgcctcctcctgctggcccagcatcttgcttgcactaaagagagctggaggcttggcactgatgcttgctaaaaacctacccaggccgcccactgctgccgcactgcagggcaccagcccacactcctcccctcctggcatcaggcacacgttcacggcactaaaccttacaggaaagcagtggaaccctgtctttccttcacaggaggcactttccttcctaggcaaaaacgatgatacccatgggcacagcatctcacatagggacacatagagatgtctgactcattaaaacccaagtctctggccaattaaaaggggtccttaatgtcctactcaacagtggtggaaggaaatttgctctatattgatgaaatgaggtggagaaaatctgattttccaaacatgagaattctccatatgccaccccataaccaaagaccccttatttgtgttagatgaaacattcaaagagcctattaggatagcggatgagacccccaagggacatgcttatacaacaataactggctccaaaccacactccatggcagtggctctcaaatgccagctcacatcacaagccctgtgctaaaacacagagttctgggccccatcccggagtttgtggttcaggaggtctggagtgtgacctcagaatatgcatttctaacaaattccccaggggatgcagatactgctgacccaaggccctccttctgagaaccactgttccagggagaagaaactcagctaagtaagggtttggctttgtgctgaagacaatgtggaatttagagttggggtgaattattcaggaaagtagagaggtttggagatgtgagggtgggaagcgcagtggagggaggcagagaggaaatatgaagcagcgtcagttggagagaaattaggaagaggaataaaatgatatatgccagggatttcagttttgctgagcccatgatgacagactcttctctggcaccttatgccactcattgagggcttgtagctggctctgctctttcagagtcataatagggctatgggtctgacctcaaggtgagctggaatgggcacaagtaatagataaaactgcaagaagtcactcaagggtccttcctagaacaaaggatccctacattccaaaggcgaatgccggtcactatcataaaagaaaagaaagaaagaaactgatggtgacattttaaatggcaatttttctagcttctaaaaggttgtggagcaactggaactttcataccctgctggtgggaatgtaaaatggtataatcactttggaaaaattggcagtgtcaccaaaagcaaagcctatacctactatccatttcactcctcagtatttacccaagagaaatgagcatgtatgtccatacaaagatttggacccaaatgttcatgacagccttatttatatagcctcaaactagaaaaagtctgtctatcaacaggtgaatggataaacaaatactggcctgtgtatctaatggaatactgctcatccacaaaaagaaacgagctattgatacacacaggagcatgcacgaaatctcaaaatgctgaatgaaggaggccagattttaattttatttttaattatttatttatttatttatttttgagacagagtctcgctctgtcacccagcctggaatgcaatggtgtgatcttggctgactgcaacctctgcctcctgagttcaagcaattctcatgcctcagcctcccaagtagctgtgactacagtcatgcacaagagcaactgactaatttttgtaattttagtagagacggggttttgccatgttggccagctgctctcacactcctgacctcaggtgatccacctgcctcggcctcctaaagtgctgggattacaggcatgagtcaccgtgcccagccggaagccagatattttttaaaagtacttattttgtgattctatttatataaaattctagaaaatgcaaacaaatccatagcgacagcaaatcagtggttgctggagatgttggaggggagaggagaggaatagattgcaaaggggaacaaggaaattcggggggacagtggatatgtctgctattttgactgtggtgatggtttcattggtatatacatatgtcaaaaacgtaacaagttgtatacgtgatttattatgtgttgactatacctcaaaaaggctattttttaaaatccccctcaggctccaggcactccattacgttggtgtgacttgtcttggaaatatactttgagcatttgccggaggagatccagtgcctgggcctctgtttcttctcccaagtagaattggcagctaaaacgggatgcccatgggcacaacttgtcacccccatcaccgaacagggagcagaaggaggctgctgggggtgcccccacagggagcacagtctcatcgggaatgacctgccatggcaaataaaatcaccagggcaagtcaagggagagaccagggaagagagtgatccagtctatattaaaaaaggatgagaaaggttgaagaaaaagagaagaagggacagaaattctcttcacacatttgcagaagtaggtccggactctccatccacttctcctcctccgataggtaggacaggaatctcagaggaaatggcatcatcttcccatgtttacagacacagcaatgaactcaaagaacaatcttatcaggattttccaaatgaaaacatggagcatatagagaataaagatccataaactcgtatggtggctgagactgaaatggttaatgaaaagcaaaagtgtgtgctgaatgacaccagccacaatggcctgaacacttaagtagtgtaatatacttggaacattgacagctaacaaggtcttcctcccatgtcagaccaagaacacagtttcctaaagataaaaatagcacatgcttttccacttttccataagtgactgcattagaaaactaacaaaccatgaaaagcaaaatatggctagtctattcaagaaaaactggtgtttctattttgtctgtaaattactttctaatacaaaaaacaattcctgttacattgaggtaattctaactagggacatatgagagagagattgaaatctcatgagctgtctccttttcatctcaattctgtgtactcgtgggtacaaatggaactagtttttgtttgtttgtttgttttttgagatggagtcttgcgctgttgcccaggctggagtgcaaaggtgtgatctcggctcactgcaacctctgcctcctgggttcaagcaattctcctgcctcagcctcctgaatagctgagattacaggcgcctgccaccatgcctgactaatttttttttttgtttgtattttttagtagagacagggtttcaccatgttggtcaggctggtctcaaactcctgacctcaggtgatccacccacctcggcctcccaaagtgctgggattacaggcgtgagccactgcacctggcccggaactagttttaaaacaggaaacagttgatatactgaatggaaaaacaatacaatttgaagttgaaaaaacaaaataagatgcccagttaaatttaaatttcagttaagcagctaatagttatttagtataagtacaacccatatacgacaattgcagtatttgttatttatctgaaattcagacttacctgggcatcctagtatcctgttttttgttttgttttgtttttccctttgttttcttttttttccccgaaatctgaccaccttaactttaaggtatttattcatttttaaaaactaaatatttttcggcagtcagaactagagcaaagataaatgatcccaggactctgtttagcaggcagtcaggaagtgtgacagtgtggtgggtggcagccccggccaggcctttcctcttccctaaactgccacagcaggactgccacacttgggaatcccagtttccatctgagcagcccctccagagtttggaaggagtcagtgctttagcctgaggagccgtggatggctctaacactttgcttgtcggttgaataaaaatcaacccaaaggtggcctacactcattgaagtaggaatgccagaacttcagtggtgtcacatagaagaaaatatctaagtgcttagggagatggcagtgctagtggatctactggatcattaagactcactcacccacccagcgcaggtctagaggacacacccttgccacactgggaagtgtaaatgagctccagcatctttatttttttttattttttatttgttttattatactttaagttttagggtacacgtgcacaaagtgcaggtttgttacatatgtatacatgtgccatgttggtgtgctgcacccattaactcgtcatttaacattaggtatatctcctaatgctatccctccccccgcccccggtgtgtgatgtcccccttcctgtgtccatgtgttcttattgttcaattcccacctatgagtgagaacatggggtgtttggttttttgtccttgtgatagtttgctgagaatgatggtttccagcttcatccatgtcccgcatctttaaaaaaaaaaaaaaatctctaagtggtggctcttctctgtagatcaggagctgtagtgagcaatgctacaaaactggagtttctaaatacaggggggatggtgggattctgaggaaggacaggccacgtggtaacacttacaaaagaccaagtgggtgtggttgccactgtggacggtggagccaaagcagtcctcagaatagtctgacccccagaggtctttggcattggctggttgatcatggtgtccctggaattgaaatagaaggacggtctactaaatttttacctgatctgtataagcagaagagttctatctctagtgaacagaagtctaactttagtcaccagaactgagagtcaattcaatcaattcccagatttgacatagtttatagacctagaaccccttgaatgaaaggtaagctggctccccttgaggaaggaccctgttacatttccggcattttattctgataatcttttttcccagccttccccaaagcaacttagggccatttaccagggaaagccatggaggaaaaggaaataattaggctatttggagattccaggacactggctctacgctgacaccagttctaagagacccaaaatatctttgtggtctaccagccaaagtagggcttcatagaggtcaggggtcactagagtttgagctcaggtctgtttcactgtgagtctagagggtccctgaacttatcctatagttattcccccagttccagaatgcagaattgagctgagagcagtggctcatgcttgtagtcccaacactctgggaggcgaaggtgagaggatcacttgagccaagcggtttgagaccagcctgggaaatatagtgagaccccatcttttaaaaagacaaagaaaaataaagaaaattgacatggaaaaataatataaaatgtgaataatctcacatctactaaagaaatccaatctgtaattagaactcctcccacagagaactataagcccagtgcccccatcaactggagaaacagaaagaaacaatcttcttaacagaaagcataattggaatagagatactctgcatcggggaagaatccccatattgattctctgatccatagagtgaaggccaagtggaagcctttggaactccctctacctgccaagatactaaacaaaacaacactgcacgtctggaggaattgtagcaagaacttgaaagatgaaggatgatgatgtccacctctctccattcagctcacctatctggtttgtgcagaagacaaataggtgttggaaaatgacagtggaccagtgtaaacttaatcaggcgggggctccagctgcagctgcaggatcaggtgttgtttcatttctgcagctaatcaacccttctcctggcacctggtgtgcagatggcaatttttcttttctattatctgttagtaaagactatcagaagctgtttattttcagttggcaaggtcagcaatacactccaagggaagagcagtctgtctcagatcttaccgatgcctggggatagggagggagtggccccctcaccgtctccaaggcctagtcctctgctcctgctactggcagcaaatccacgcaggtctgcaacaacctcaattcctgcctcctcagaagaaagaattcaattgagggacataagacagaaggagagactgaggcaagttttagcacaggagtaaaagtttatttaaaagctttagaataggaacaaaaggaaggaaagtacacttggaagagggccaagtggacgacttaaaaagcaagtgcgtggtttgaccttttgacttggggttttatacgtcagcatgctttcggggtcttgcgttatttctcccctggttcttcccttggggtgggctgtcccatgtgcctgcctgagcccactggctcaactcctgagatcttatagggaaactactgctcaccagtttcgagtgttttctatctattaggagccggcttttccctgttgccgggtgtgaccaattattactttagaaagacagtcaacaaccgccagaccatcacctgatggtcacctgacactcctggtgtgtggggtatggggagccctctcctgccctgctctttctgactagctacccactataacactcccagagggacctgcacattttgtgctctttgcaagacagtgcctgcccagcacctgtaggcctgctcaccccttcagggtcatgatttttgctttttaccgcaggtacccataagcaaaacatggcattgttcaccatgcttttacattattcacataattttaagttatttacacaacaatgtaaaaccatggtgaaccatgccacatgttgcttatgggtacctgtggtaaaaatcctgctactagctcattttgcagtgtctataatgacaggtaatgctccattcactcctttatgacacttgcaaaaactgagaacataacgcctcccagttaagcaggcatctgggcaatgtgaggagaacagaaatagaccacgctgcatttatctctcttgatgacaggcattgagatttccactttttctggtttcttattatgtctctactgggcattcttacatacatcttgcacgccatggaaagtttctctagggcagtggttcacaaactttttggatacagaatacttttatgtgcttgaaaactgaggaccccatacagctttagtttatgtgggtgtaaggttctagcccaaactgaagtccgaagggagttggtgggtgggtgaggggtagctgaaaaaacacccgaggaatcataggcagtttgaacatggccttatcctctctctgggcacgagccatatgtccagtgtcagcagggtaattataccttttacagacaatagaggctctgaagcaatcacgagctcacgtgagtggtcacctaatgcacctcaagtggcatggttcataatgtgcggagtcgtgtgcctacgctccaaacccactgagtcatggtgcaccaaaaagtggcctcagcctgctcctgactaaagcgcagccatcttccttacactccacccctaggccaggggcatcctccaggtagggacatgtgcccgtagggtggagccctgaatccataatccacagcaacaatacggagagcaacagctcacgactaggattccagctatgctacttatgactatcagggcccagcgtaggccagagcccagggatgtctaccatctctgcagggggtcatcagtaaggctcttgactaccttaatctcctgtgagaccccttgcagggctgctgttatgttctgccaattgtcagggataaaggtacaacattgtgttcctaaaagggcacaggtgcctccttaggcagcagttactatgtctaagaccattcggtttcgcaacaccacctttctgatctgatcaacctcatccattaatgggaagagggccactcaggtgtaattcagagcctgagcagcatgctctgcaagagcagtaacttggcttctacagttgtgacacacactccagggctagtgcctgtcaaggggtaaaaccaccagggtgctcattacacttgcaaaaaccgagagtgtagcacctcccagttatgcaggcatctgggcaatgtgagaacagtggcaggtacatgaggccaccctcaggtataatgtccagtccagtttgcttataggtaaggccaccctgtgtccccacagacccataaactcccagggggcacacagtccatcgaggccccttggtggggccgcgtcttccaccatacctttggtgtggtgacatgtattatgcttacacacactgtgacgggtacccatcccacagtgctattaccccagtgttgctatatgcaccacagtgcctgggccaggggtactgcacgttacctcactagccagccccacccatcataaatgctatgggccagccagggaatggctgtgctgtgggtcttgtggcatcctttgtccaaaacttgccacgttgcgttccaggcatcagccatgggaccccaagtctccagccatgtctggttctctgcagatgctgaatgtatgtgctaaggcaagccatctgcagctgctagaagggcggtgcagatccaacagttggaaacattggtcacttcagtgtaggtgtgggcccagtccacaatgcagttggagcatgttaacctacagttggaatgacagagtaggcataggtactaacagaggaaaatcacatccctcaggtaaaatacaggctaacctttcatccctggataacaatgcagcccccaaggggttctgccctgggcaatagtaccacaccttttcagctccccatggttcctttgggtcctgtattcatgcgaaagtcacaggggagcttgtagtaggccacacagacagtacatttgaaccctggaggaaagtttcttccctggccgttttcctacaaacagttaacttcggggaccattcattgaacacccaaagagtgacatacaagtcatactgtaggccctccccacagggagctacgatggacaaccaccagcagccgggggcttggaggggctatggccacagccaggttttctgttcccctgccttcagggacgttggggcaggcaacaacaggttactgttcatccccatacctggtcagaggcggttacccttggtgtgtatctgcaactgaataggggtggtggcccatgtaacaaagcctccacctgggctgggctgcttttccatggccattcattcaaggtttggagcatcaggtccagcctggaacttcagccctgcaaagacaggagtgtgacatgcaagtaaaacccattcttcaagagctcgctatatcactcaatcatacccacagcttgcaagttgtgcggtacatggaatccctactttatgtccattgttgtgcctgttgtccagtaaaatgtgtcccccatcactctcaatgaccaaagggcaaccatatagagcacataagtgttgcagggtctggatggtgtgctgttggttggccaccctgcaaggataggcaaacaacaggcctgtggctgtgtccacagctgttagcgcatgagtatacccttgtgacttcggcagcagcccaatgtagtctacttgccacctggtcaagggcacttgccctgttgtcacttgtgtagcactggacagctgcctccatttagggtatgcctgagcacatgccgggcatttctgacaagcctcccaaatgtcttgcatgggcagagacagaccccaacatttattgacttgttgcatcagtttaccccctgcatgtcccagtttccggtgtagctacaaggccacatctcatgtagatgccaactctaaccatcggaccttggccaaggcttctgcctcgtcattgctgggggtggccagaggcatatggcctgacaaatgataaatagttacatctttgcaatgacccatttcccagaggtcttgctacatgggttggtggccccaaatgggttggtggccaactagccaattctgtattttccaagtagttaaacacaaagttaggcctccatagactgcccagctatcggtacggattaccataggtgtctccgccttgttgatcaccatccatactgctttaaattcagcccattgactactttgtccacatctggtttcaaaccatatggttttggtactaagttggactgcaacactggtccaagcaggagtagcacctcgactagacccatctgtgtgccatgccccatcaggaatagagggacgcccttccttaaatggcagtggctcagggtcaaggggtgcctcaggccccatggccttctcttgcattaggactgcaggtcccaagacctcttgcaactctgctgctaatgggcttgtgctcagcgtactctgttgctccaagtaagtgcctcactttgccaaagtggatgtctgcaccatcccagtctggggggtcattacacatgaatgcacccatcccgctgtcaggtaagtcatccacactgtgactgtagcccatcctatcacttctcacaagcctgaagggcagcatatacagctgctagctatttctctatcaaggaataccagagctcagctcctttccatagttgggaccaaaagcctcctggcattctcaggcactctgtgtgctgccacaggcccaaactaaaaccatctgtggtcacatgcatatccagttcaaatgggcaccccttgtcaaatacccacagggctcgtgcctgctgaatagcccacttggctgccaggaagccagtctcagccacatcagcccaatcccagattgctcccttctttgttaactgatacaatggttttatcatttgagctaaatgaggcaggaatgtccaccaatatcccaggaggctcacaaaagtttgcagctgcctcaccgtggtgggccagggatatgcctaaattttgtcaatgatagcctcttgtatggccttcatcttacccgaccagataactcccaagaatttagcaggtaatccaggccctcggaccttggatttgttgatggcccaactgcatgctgccaaatgttgccacaagaggggtgccactgcttctaaatctgcaagagaatcagaggttaacataatatcatcaacgtaatggaacaagtggactccctttggacattttcaggctgttaaatccatggcaacaagaccatgacatatggtggagctatgcacatagccctgcagcaacactgtgaaagtccattgtcatcaaggcaaactgttcctggctctctagagcaaggtcaactgagaagaatgcattggccaagtccaccacatagtggtactgtcctaattccattgtcgagtggttcatcaaatccatgatagatggcacagcttccaagccatgtaaaatatccacctccagaatgtattcaggtatgggagagacatacacagtgtataagcaaggagccaagtggccaatgccaaggtacagagatacaggtttcactttcactgactggcctccgtaacctttaatatatgcagatttgcccaaaaacttaactgggttcccataaacaaggctacaatctatgccagtatctaccagcaccagcacccactgtacattggtgggggaccagtggattgccaattccacatgtggcctctggtcatctggtgtccccccaagccagacacctttggccagttccctagttgaacagaaaaggctctacatttccacctggctgcagcaagtagtctctgagctgggtaggaccaggtcacacagcaatgcctttctcccctttgggcattttccggaattgctgccctgcatacaactgtctccgcaaagttaggagtatttcattgggctgcttatcaattttctctcagtcaaccccagccaaaatcaaatctatccacatctgtgagcgtgtcactcgttggggccccctttttttatgggggagccccctgtgggtggggtaacttccccttctttatggtgtggaccctccaatccccctgaaggccttctgcttccctgagagccgccatggcagtggttacttcatgtatgcggtgccctacgtatggggtgaggacagcagctagggagccaaaggggctcaggagcatcaaacccaacatgagatccctcatgtgggaggtgaaacatttatcatctggccctcaggtattcaggacaaacatagcctgccgcatacccatctcccgaatgacttacaccaaattggcatatgactgccatttactcacagttttgggcatttcaccagcattattccacacagttcatatggctgcctgtagccactcagtcagggtgtggtctccttgcgctgccactaaccacctgctcacttgcagccgctgacagagagaggggtgagtcatggtggaggccagcttgtccatctcagaggtggaatgggagataccatctgctcccttgttccacagacgaagcatccaggcaggcaggggttcccctggacactggcaacactgcttgcctaattcctgcaactcagttggggtacaggcaatatacgaaatgtgttgcattatggtggggagtccctgagtccacccttggagccccagtggctgttcatgatctaccttctgtcagaccaccgggtgagcccgcaacaggggttcttcctccttggtatgaaactgagtggggatctccagacaagatgatggacccaggcctgcattcatggtagcctctaattccttttccaagctctgaagccacacctccaggcatcctgcctgcacctggaggtccccattcatggcagcctctaattattttccagatcggtgtagccagacctccagtctgcatccctcagggactgggtgtgtacttttcttagcacagttaaaaatgcccatccaactctgccagcaaaggctctctccttcttggtgctctgcacttccagctgcttcagcgccttctccatgctcatgggggacccatctactgccacccaggtttccactcaggcccaccctcacagcacggctaccaccgggtaccacaacccatgttgtggtcacatggccaacctggaatcagcagggaccgaaggctcacttaccttaggatcctgttcgtgatgccaattgtcaggttctagcccaaactaaagtccaaggggagttggtgggtgggtggcaggtaactggaaaaacactcgagtaggcggtttcgacatggctttattctctctctgggtgcaagccatatgtagtgtcagcagggtaattttaccttttacagacaatagtggctttgagccaagcacgtgctcatatgagtggtcacctaatgcacctcacatggcatggttacataatgtgtggagttgtgtgcctgcctccaaacccactgagtcatgctgcaccagaaggctgcctcggcctactcctgactaaagcacaaccatctcccttagagtgggctaaatctactgctatttatactattagaaattttaacacagaagttttaaatatttacattgttaattgattttgaaataataagcccattacaggttaacataattaacatacttttattaaaaatatctgtattttttaaaagaaaaaaaattagcaacaacagtgatccttggaatcgtcccacctcagcctcccaagtagctgagaccacaggcgcacatcaccatgcgagctaatttctatattttttggtagagatgggatcttgccatgctggccagggtggtctcgagctcctaagctcaagtgatcctcctgcctcggtctcccaaagtgctgagattacaggtgtgagccaccacttctggccagaagctggattctctgtcttgttctccatccaatctgttagactgtcaaatgccaaataacctttggaaaattctactcgtaaaataaggagagagataaataacttctgagtatcatcattaaaatagtttgacctcatggacccactgggtcccatgtggagaatagctctaagctaaagagtagaatggctgggaggggacataaacattcagcccatagctgctgaccacaataacacattttaagtctcttcctctcctgctccttgtgattgcagacagactcaatctgtaggagagctgtagagagaacaagctcaagcccctgattttgcctacaaagaaagctgagcccagcaaagttaagggacttacccaaggtcacacagccacacagcagagctggggctgagctccaggtgtcctgctacagaggccacttctttctcccactagggactggcctgtgattacttcagaaaacaatggtcagctaactgattctgaacgccctttgctggtaaaagctaatctcctgaggaaaaatgtatgcattggctgggcgcagtggctcaagcctataattccagcattttgggaggtggagacaggtggatcacttgaggtcaggagtttaagaccagcctggcagtcatggtgaaaccccgtctctactaaaactacaaatattaagctcggcatggtggcaggcacctgtaatcccagctactggagagactgaggcaggagaatcgcttgaacccaggaggcggaggttgcagtgagccgaggtcgcaccactgcattccatcctgggcaacagagtgagattctgtctcaaaaaataataatagtaaaataaaaataaataaaaaaataagtatgcatcacctcaggtggtcagtcagctttcccaagaccccaaagcacacaatgttctttctggtatgagtgacatggggttcacagcaccacaaagtccatgacttttccctcagaagtgaatgcatggctaattattttgtattttttgtagacatggagttttgccatgttgcccacgctgctctcaaattcctggactcaagtaatccacccacctcagcttcccaaggtgctgggattacaggcatgagacaccgcatgncctgcacctatagtcccagctatcaggaggctgaggtgggaggatcacctgaaccggggaagttgaacctgcagtgaactgtgatcgctccggtgcactccatcctgggcaacagagtgagatcctgcctcaaaaaaaaaaaaaaagtgaacacacatgctggggaagaggcctgcaggcacccctgccagttctgcaccagagcacactgtagcagccctgctgtgatgcaggaagcagctccaggtcctgcagtctgaagcatggagcctgaagcctggagccccccatccaatgctgcgccatgctcaccagtatcccccagcatcagcaccgaggcaccagctgcagataaatttctcacctaaaatgttgagagatgttgctaaactgtccttctaagggtatgtataataatacggtcctgccgatactgaataagactatctgtttcattacatcctcacaatactgaatatcattagcaacttgaattttaa

SEQ ID NO: 36 - DNA, 51 bp, Homo sapiens
gattacaggcatgagacaccgcatggcctgcacctatagtcccagctatca

SEQ ID NO: 37 - DNA, 51 bp, Homo sapiens
gattacaggcatgagacaccgcatgacctgcacctatagtcccagctatca

What is claimed is:

1. A method of detecting whether a nucleotide of one or more single nucleotide polymorphisms (SNP) is present at a SNP position, wherein the one or more SNPs is selected from adenine or cytosine at a SNP position a1, cytosine or guanine at SNP position b2, guanine or thymine at SNP position c3, cytosine or thymine at SNP position d4, thymine or guanine at SNP position e5, guanine or adenine at SNP position f6, guanine or adenine at SNP position g7, thymine or cytosine at SNP position h8, adenine or guanine at SNP position i9, guanine or adenine at SNP position j10, adenine or guanine at SNP position k11, cytosine or thymine at SNP position l12, and guanine or adenine at SNP position m13, comprising:
obtaining from a human subject a blood sample having or suspected of having the nucleotide at the SNP position; and
detecting in the blood sample whether the nucleotide of the SNP is present at the SNP position, wherein the nucleotide is selected from cytosine at SNP position b2, guanine at SNP position c3, cytosine at SNP position d4, thymine at SNP position e5, guanine at SNP position f6, guanine at SNP position g7, thymine at SNP position h8, adenine at SNP position i9, guanine at SNP position j10, adenine at SNP position k11, cytosine at SNP position l12, and guanine at SNP position m13.

2. The method of claim 1, further comprising, detecting in the blood sample whether adenine is present at SNP position a1.

3. The method of claim 1, wherein the nucleotide is detected in two or more SNPs.

4. The method of claim 1 or 2, wherein the subject potentially has been exposed to or has been exposed to infection by antibiotic-resistant Staphylococcus aureus (MRSA) or a surgical site infection (SSI).

5. The method of claim 4, wherein (a) the subject has had a surgical procedure or a procedure involving an invasive medical device, has been living in unsanitary conditions, or has been participating in sports activities with exposure to cuts or other injuries; or (b) is in need of a surgery or a stay at a medical treatment or care facility.

6. The method of claim 1, wherein the detecting step includes contacting the blood sample with an oligonucleotide probe that is hybridizable with the nucleotide located at the SNP position, and detecting the hybridization.

7. The method of claim 1 or 2, further comprising: administering to the subject an aggressive treatment for recurrent MRSA when the detected nucleotide of the SNP is present at the SNP position.

8. The method of claim 7, wherein the aggressive treatment is selected from decolonization of MRSA from the skin or nasal passages of the subject, aggressive antibiotic therapy, administration of antibiotic-resistant drugs, isolation therapy, and recolonization therapy.

9. A method of detecting whether a nucleotide of one or more single nucleotide polymorphisms (SNP) is present at a SNP position, wherein the one or more SNPs is selected from adenine or cytosine at a SNP position a1, cytosine or guanine at SNP position b2, guanine or thymine at SNP position c3, cytosine or thymine at SNP position d4, thymine or guanine at SNP position e5, guanine or adenine at SNP position f6, guanine or adenine at SNP position g7, thymine or cytosine at SNP position h8, adenine or guanine at SNP position i9, guanine or adenine at SNP position j10, adenine or guanine at SNP position k11, cytosine or thymine at SNP position l12, and guanine or adenine at SNP position m13, comprising:
obtaining from a human patient a blood sample having or suspected of having the nucleotide at the SNP position; and
detecting in the blood sample whether the nucleotide of the SNP is present at the SNP position, wherein the nucleotide is selected from guanine at SNP position b2,
thymine at SNP position c3, thymine at SNP position d4, guanine at SNP position e5, adenine at SNP position f6, adenine at SNP position g7, cytosine at SNP position h8, guanine at SNP position i9, adenine at SNP position j10, guanine at SNP position k11, thymine at SNP position l12, and adenine at SNP position m13.

10. The method of claim 9, further comprising, detecting in the blood sample whether cytosine is present at SNP position a1.

11. The method of claim 9 or 10, further comprising: not administering to the subject an aggressive treatment for recurrent MRSA when the detected nucleotide of the SNP is present at the SNP position.

12. A method of providing medical services to a human subject suspected of having or having recurrent antibiotic-resistant Staphylococcus aureus (MRSA) or a surgical site infection (SSI), comprising:
obtaining a biological sample from the subject;
requesting diagnostic information about the sample, wherein the diagnostic information is an identity of a nucleotide of one or more single nucleotide polymorphisms (SNP) at a SNP position, wherein the one or more SNPs is selected from adenine or cytosine at a SNP position a1, cytosine or guanine at SNP position b2, guanine or thymine at SNP position c3, cytosine or thymine at SNP position d4, thymine or guanine at SNP position e5, guanine or adenine at SNP position f6, guanine or adenine at SNP position g7, thymine or cytosine at SNP position h8, adenine or guanine at SNP position i9, guanine or adenine at SNP position j10, adenine or guanine at SNP position k11, cytosine or thymine at SNP position l12, and guanine or adenine at SNP position m13; and
administering a treatment for recurrent MRSA or SSI when the identity of the nucleotide of one or more SNPs is a high MRSA risk SNP.

13. The method of claim 12, further comprising requesting additional diagnostic information about the sample, wherein the additional diagnostic information is an identity of adenine or cytosine at a SNP position a1; and administering a treatment for recurrent MRSA or SSI when the identity of the nucleotide of one or more SNPs is a high MRSA risk SNP and adenine is identified at the SNP position a1.

14. The method of claim 12, wherein the identity of the nucleotide of one or more SNPs is selected from cytosine at SNP position b2, guanine at SNP position c3, cytosine at SNP position d4, thymine at SNP position e5, guanine at SNP position f6, guanine at SNP position g7, thymine at SNP position h8, adenine at SNP position i9, guanine at SNP position j10, adenine at SNP position k11, cytosine at SNP position l12, and guanine at SNP position m13; and the treatment for recurrent MRSA or SSI is administered.

15. The method of claim 13, wherein the identity of the nucleotide at SNP position a1 is adenine; and the treatment for recurrent MRSA or SSI is administered.

16. The method of claim 14 or 15, wherein the treatment is selected from decolonization of MRSA from the skin or nasal passages of the subject, aggressive antibiotic therapy, administration of antibiotic-resistant drugs, isolation therapy, and recolonization therapy.

17. The method of claim 12, wherein the identity of the nucleotide of one or more SNPs is selected from guanine at SNP position b2, thymine at SNP position c3, thymine at SNP position d4, guanine at SNP position e5, adenine at SNP position f6, adenine at SNP position g7, cytosine at SNP position h8, guanine at SNP position i9, adenine at SNP position j10, guanine at SNP position k11, thymine at SNP position l12, and adenine at SNP position m13; and the treatment for recurrent MRSA or SSI is not administered.

18. The method of claim 13, wherein the identity of the nucleotide at SNP position a1 is cytosine; and the treatment for recurrent MRSA or SSI is not administered.

19. An artificial probe comprising:
one or more oligonucleotides from 5 to 1500 nucleotides in length, and conjugated to a label, marker or detectable moiety,
wherein the one or more oligonucleotides is able to hybridize with from 5 to 1500 nucleotides adjacent to and including a single nucleotide located at a SNP position, and
wherein the single nucleotide is selected from the group consisting of cytosine or guanine at SNP position b2, guanine or thymine at SNP position c3, cytosine or thymine at SNP position d4, thymine or guanine at SNP position e5, guanine or adenine at SNP position f6, guanine or adenine at SNP position g7, thymine or cytosine at SNP position h8, adenine or guanine at SNP position i9, guanine or adenine at SNP position j10, adenine or guanine at SNP position k11, cytosine or thymine at SNP position l12, and guanine or adenine at SNP position m13.

20. The probe of claim 19, further comprising an oligonucleotide from 5 to 1500 nucleotides in length, and conjugated to a label, marker or detectable moiety, wherein the oligonucleotide is able to hybridize with from 5 to 1500 nucleotides adjacent to and including an adenine or cytosine located at a SNP position a1.

21. The probe of claim 19, wherein the one or more oligonucleotides is from 10 to 200 nucleotides.

22. The probe of claim 19, wherein the single nucleotide located at the SNP position is selected from the group consisting of: cytosine at SNP position b2, guanine at SNP position c3, cytosine at SNP position d4, thymine at SNP position e5, guanine at SNP position f6, guanine at SNP position g7, thymine at SNP position h8, adenine at SNP position i9, guanine at SNP position j10, adenine at SNP position k11, cytosine at SNP position l12, and guanine at SNP position m13.

23. The probe of claim 19, wherein the single nucleotide located at the SNP position is selected from the group consisting of guanine at SNP position b2, thymine at SNP position c3, thymine at SNP position d4, guanine at SNP position e5, adenine at SNP position f6, adenine at SNP position g7, cytosine at SNP position h8, guanine at SNP position i9, adenine at SNP position j10, guanine at SNP position k11, thymine at SNP position l12, and adenine at SNP position m13.

24. The probe of claim 19, wherein the one or more oligonucleotides is conjugated to a detectable moiety and the detectable moiety is selected from:
a) a radioactive label;
b) a P³² label; and
c) a fluorescent label.

25. The probe of claim 19, wherein the hybridization occurs under strict conditions.
